(19) United States
(12) Patent Application Publication
(10) Pub. No.: US 2025/0340872 A1
(43) Pub. Date: Nov. 6, 2025

(54) COMPOUNDS AND METHODS FOR REDUCING TAU EXPRESSION

(71) Applicant: Ionis Pharmaceuticals, Inc., Carlsbad, CA (US)

(72) Inventor: Susan M. Freier, San Diego, CA (US)

(73) Assignee: Ionis Pharmaceuticals, Inc., Carlsbad, CA (US)

(21) Appl. No.: 18/699,132

(22) PCT Filed: Oct. 7, 2022
(86) PCT No.: PCT/US2022/077740

§ 371 Date: Apr. 5, 2024

Related U.S. Application Data
(60) Provisional application No. 63/253,516, filed on Oct. 7, 2021.
(60) Provisional application No. 63/317,743, filed on Mar. 8, 2022.

(51) Int. Cl. C12N 15/113

(52) U.S. Cl. CPC C12N 15/113; C12N 2310/14; C12N 2310/315; C12N 2310/321; C12N 2310/322; C12N 2310/3231

(57) ABSTRACT

Provided are RNAi agents, methods, and pharmaceutical compositions for reducing the amount or activity of tau RNA in a cell or animal, and in certain instances reducing the amount of tau protein in a cell or animal. Such RNAi agents, methods, and pharmaceutical compositions are useful to ameliorate at least one symptom or hallmark of a neurodegenerative disease, including a tauopathy, Alzheimer's disease, fronto-temporal dementia (FTD), FTDP-17, progressive supranuclear palsy (PSP), chronic traumatic encephalopathy (CTE), corticobasal ganglionic degeneration (CBD), epilepsy, or Dravet's Syndrome.

### SEQUENCE LISTING

[0001] The present application is being filed along with a Sequence Listing in electronic format. The Sequence Listing is provided as a file entitled BIOL0438WOSEQ.xml created Oct. 3, 2022, which is 1.68 MB in size. The information in the electronic format of the sequence listing is incorporated herein by reference in its entirety.

### FIELD

[0002] Provided are RNAi agents, methods, and pharmaceutical compositions for reducing the amount or activity of tau RNA in a cell or animal, and in certain instances reducing the amount of tau protein in a cell or animal. Such agents, methods, and pharmaceutical compositions are useful to ameliorate at least one symptom or hallmark of a neurodegenerative disease. Such neurodegenerative diseases include tauopathies, Alzheimer's disease (AD), frontotemporal dementia (FTD), FTDP-17, progressive supranuclear palsy (PSP), chronic traumatic encephalopathy (CTE), corticobasal ganglionic degeneration (CBD), epilepsy, or Dravet's Syndrome. Such symptoms or hallmarks include loss of memory, loss of motor function, and increase in the number and/or volume of neurofibrillary inclusions.

### BACKGROUND

[0003] The primary function of tau is to bind to and stabilize microtubules, which are important structural components of the cytoskeleton involved in mitosis, cytokinesis, and vesicular transport. Tau is found in multiple tissues but is particularly abundant in the axons of neurons. In humans, there are six isoforms of tau that are generated by alternative splicing of exons 2, 3, and 10. Splicing of exons 2 and 3 leads to inclusion of zero, one, or two 29 amino acid acidic domains and is termed 0N, 1N, or 2N tau, respectively. The influence of these domains on tau function is not fully clear, though may play a role in interactions with the plasma membrane. Inclusion of exon 10 leads to inclusion of the microtubule binding domain encoded by exon 10. Since there are 3 microtubule binding domains elsewhere in tau, this tau isoform (with exon 10 included) is termed 4R tau, where ‘R’ refers to the number of repeats of microtubule binding domains. Tau without exon 10 is termed 3R tau. Since more microtubule binding domains (4R compared with 3R) increases the binding to microtubules, 4R tau presumably significantly increases microtubule binding and assembly. The ratio of 3R/4R tau is developmentally regulated, with fetal tissues expressing exclusively 3R tau and adult human tissues expressing approximately equal levels of 3R/4R tau. Deviations from the normal ratio of 3R/4R tau are characteristic of neurodegenerative FTD tauopathies. It is not known how changing the 3R/4R tau ratio at a later stage in the adult animal will affect tau pathogenesis.

[0004] Serine-threonine directed phosphorylation regulates the microtubule binding ability of tau. Hyperphosphorylation promotes detachment of tau from microtubules. Other post translational modifications of tau have been described, however the significance of these is unclear. Phosphorylation of tau is also developmentally regulated with higher phosphorylation in fetal tissues and much lower phosphorylation in the adult. One characteristic of neurodegenerative disorders is aberrantly increased tau phosphorylation. The microtubule network is involved in many important processes within the cell including structural integrity needed for maintaining morphology of cells and operating transport machinery. Since binding of tau to microtubules stabilizes microtubules, tau is likely to be a key mediator of some of these processes and disruption of normal tau in neurodegenerative diseases may disrupt some of these key cellular processes.

[0005] One of the early indicators that tau may be important in neurodegenerative syndromes was the recognition that tau is a key component of neurofibrillary inclusions in Alzheimer's disease. In fact, neurofibrillary inclusions are aggregates of hyperphosphorylated tau protein. Along with amyloid beta containing plaques, neurofibrillary inclusions are a hallmark of Alzheimer's disease and correlate significantly with cognitive impairment. 95% of tau accumulations in AD are found in neuronal processes and is termed neuritic dystrophy. The process(es) whereby this microtubule associated protein becomes disengaged from microtubules and forms accumulations of proteins and how this relates to neuronal toxicity is not well understood.

[0006] Neuronal tau inclusions are a pathological characteristic of not only Alzheimer's disease, but also a subset of frontotemporal dementia (FTD), PSP, and CBD. The link between tau and neurodegeneration was solidified by the discovery that mutations in the tau gene cause a subset of FTD. These genetic data have also highlighted the importance of the 3R:4R ratio of tau. Many of the tau mutations that cause FTD lead to a change in tau splicing, which leads to preferential inclusion of exon 10, and thus to increased 4R tau. The overall tau levels are normal. Whether the tau isoform change or the amino acid change or both cause neurodegeneration remains unknown. Recent data suggest that PSP may also be associated with an increased 4R:3R tau ratio.

[0007] To help understand the influence of tau ratios on neurodegeneration, a mouse model based on one of the splicing tau mutations (N279K) has been generated using a minigene that includes the tau promoter and the flanking intronic sequences of exon 10. As in humans, these mice demonstrate increased levels of 4R tau compared with transgenics expressing WT tau and develop behavioral and motor abnormalities as well as accumulations of aggregated tau in the brain and spinal cord.

[0008] Tau protein has been associated with multiple diseases of the brain including Alzheimer's disease, FTD, PSP, CBD, dementia pugilistica, parkinsonism linked to chromosome, Lytico-Bodig disease, tangle-predominant dementia, ganglioglioma, gangliocytoma, meningioangiomatosis, subacute sclerosing panencephalitis, lead encephalopathy, tuberous sclerosis, Hallervorden-Spatz disease, Pick's disease, argyrophilic grain disease, corticobasal degeneration or frontotemporal lobar degeneration and others. Tau-associated disorders such as AD are the most common cause of dementia in the elderly. AD affects an estimated 15 million people worldwide and 40% of the population above 85 years of age. AD is characterized by two pathological hallmarks: tau neurofibrillary inclusions (NFT) and amyloid-β (Aβ) plaques.

[0009] There is currently a lack of acceptable options for treating such neurodegenerative diseases. It is therefore an object herein to provide methods for the treatment of such diseases.

### SUMMARY

[0010] Provided herein are RNAi agents, methods and pharmaceutical compositions for reducing the amount or activity of tau RNA, and in certain embodiments reducing the amount of tau protein in a cell or animal. In certain embodiments, the animal has a neurodegenerative disease. In certain embodiments, the neurodegenerative disease is a tauopathy, Alzheimer's disease, frontotemporal dementia (FTD), FTDP-17, progressive supranuclear palsy (PSP), chronic traumatic encephalopathy (CTE), corticobasal ganglionic degeneration (CBD), epilepsy, or Dravet's Syndrome. In certain embodiments, RNAi agents useful for reducing expression of tau RNA are oligomeric duplexes.

[0011] Also provided are methods useful for ameliorating at least one symptom or hallmark of a neurodegenerative disease. In certain embodiments, the neurodegenerative disease is a tauopathy, Alzheimer's disease, frontotemporal dementia (FTD), FTDP-17, progressive supranuclear palsy (PSP), chronic traumatic encephalopathy (CTE), corticobasal ganglionic degeneration (CBD), epilepsy, or Dravet's Syndrome. In certain embodiments, the neurodegenerative disease is AD or FTD. In certain embodiments, the symptom or hallmark includes loss of memory, loss of motor function, and increase in the number and/or volume of neurofibrillary inclusions.

### DETAILED DESCRIPTION

[0012] It is to be understood that both the foregoing general description and the following detailed description are exemplary and explanatory only and are not restrictive. Herein, the use of the singular includes the plural unless specifically stated otherwise. As used herein, the use of “or” means “and/or” unless stated otherwise. Furthermore, the use of the term “including” as well as other forms, such as “includes” and “included”, is not limiting. Also, terms such as “element” or “component” encompass both elements and components comprising one unit and elements and components that comprise more than one subunit, unless specifically stated otherwise.

[0013] The section headings used herein are for organizational purposes only and are not to be construed as limiting the subject matter described. All documents, or portions of documents, cited in this application, including, but not limited to, patents, patent applications, articles, books, treatises, and GenBank and NCBI reference sequence records are hereby expressly incorporated by reference for the portions of the document discussed herein, as well as in their entirety.

### Definitions

[0014] Unless specific definitions are provided, the nomenclature used in connection with, and the procedures and techniques of, analytical chemistry, synthetic organic chemistry, and medicinal and pharmaceutical chemistry described herein are those well-known and commonly used in the art. Where permitted, all patents, applications, published applications and other publications and other data referred to throughout in the disclosure are incorporated by reference herein in their entirety.

[0015] Unless otherwise indicated, the following terms have the following meanings:

[0016] As used herein, “2′-deoxynucleoside” means a nucleoside comprising a 2′-H(H) deoxyfuranosyl sugar moiety. In certain embodiments, a 2′-deoxynucleoside is a 2′-β-D-deoxynucleoside and comprises a 2′-β-D-deoxyribosyl sugar moiety, which has the β-D ribosyl configuration as found in naturally occurring deoxyribonucleic acids (DNA). In certain embodiments, a 2′-deoxynucleoside may comprise a modified nucleobase or may comprise an RNA nucleobase (uracil).

[0017] As used herein, “2′-MOE” or a “2′-O-methoxyethyl” means a 2′-O(CH₂)₂OCH₃ group in place of the 2′-OH group of a furanosyl sugar moiety. A “2′-MOE sugar moiety” or a “2′-O-methoxyethyl sugar moiety” means a sugar moiety with a 2′-O(CH₂)₂OCH₃ group in place of the 2′-OH group of a furanosyl sugar moiety. Unless otherwise indicated, a 2′-MOE sugar moiety is in the β-D-ribosyl configuration. “MOE” means O-methoxyethyl.

[0018] As used herein, “2′-MOE nucleoside” or “2′-O(CH₂)₂OCH₃ nucleoside” means a nucleoside comprising a 2′-MOE sugar moiety.

[0019] As used herein, “2′-OMe” means a 2′-OCH₃ group in place of the 2′-OH group of a furanosyl sugar moiety. A “2′-O-methyl sugar moiety” or “2′-OMe sugar moiety” or “2′-O-methylribosyl sugar moiety” means a sugar moiety with a 2′-OCH₃ group in place of the 2′-OH group of a furanosyl (e.g., ribosyl) sugar moiety. Unless otherwise indicated, a 2′-OMe sugar moiety is in the β-D-ribosyl configuration.

[0020] As used herein, “2′-OMe nucleoside” or “2′-OMe modified nucleoside” means a nucleoside comprising a 2′-OMe sugar moiety.

[0021] As used herein, “2′-F” means a 2′-F group in place of the 2′-OH group of a furanosyl sugar moiety. A “2′-fluoro sugar moiety” or “2′-F sugar moiety” or “2′-fluororibosyl sugar moiety” means a sugar moiety with a 2′-F group in place of the 2′-OH group of a furanosyl sugar moiety. Unless otherwise indicated, a 2′-F sugar moiety is in the β-D-ribosyl configuration.

[0022] As used herein, “2′-F nucleoside” or “2′-F modified nucleoside” means a nucleoside comprising a 2′-F modified sugar moiety.

[0023] As used herein, “xylo 2′-F” means a 2′-F sugar moiety in the β-D-xylosyl configuration.

[0024] As used herein, “2′-substituted nucleoside” means a nucleoside comprising a 2′-substituted furanosyl sugar moiety. As used herein, “2′-substituted” in reference to a sugar moiety means a sugar moiety comprising at least one 2′-substituent group other than H or OH.

[0025] As used herein, “3′ target site” refers to the 3′-most nucleotide of a target nucleic acid which is complementary to an antisense oligonucleotide, when the antisense oligonucleotide is hybridized to the target nucleic acid.

[0026] As used herein, “5′ target site” refers to the 5′-most nucleotide of a target nucleic acid which is complementary to an antisense oligonucleotide, when the antisense oligonucleotide is hybridized to the target nucleic acid.

[0027] As used herein, “5-methylcytosine” means a cytosine modified with a methyl group attached to the 5 position. A 5-methylcytosine is a modified nucleobase.

[0028] As used herein, “abasic sugar moiety” means a sugar moiety of a nucleoside that is not attached to a nucleobase. Such abasic sugar moieties are sometimes referred to in the art as “abasic nucleosides.”

[0029] As used herein, “administering” or “administration” means providing a pharmaceutical agent or composition to a subject.

[0030] As used herein, “antisense activity” means any detectable and/or measurable change attributable to the hybridization of an antisense compound to its target nucleic acid. In certain embodiments, antisense activity is a decrease in the amount or expression of a target nucleic acid or protein encoded by such target nucleic acid compared to target nucleic acid levels or target protein levels in the absence of the antisense compound. In certain embodiments, antisense activity is the modulating of splicing of a target pre-mRNA.

[0031] As used herein, “antisense agent” means an antisense compound and optionally one or more additional features, such as a sense compound.

[0032] As used herein, “antisense compound” means an antisense oligonucleotide and optionally one or more additional features, such as a conjugate group.

[0033] As used herein, “antisense oligonucleotide” means an oligonucleotide, including the oligonucleotide portion of an antisense compound, that is capable of hybridizing to a target nucleic acid and is capable of at least one antisense activity. Antisense oligonucleotides include, but are not limited to, antisense RNAi oligonucleotides.

[0034] As used herein, “antisense RNAi oligonucleotide” means an oligonucleotide comprising a region that is complementary to a target sequence, and which includes at least one chemical modification suitable for RNAi-mediated nucleic acid reduction.

[0035] As used herein, “ameliorate” in reference to a treatment means improvement in at least one symptom or hallmark relative to the same symptom or hallmark in the absence of the treatment. In certain embodiments, amelioration is the reduction in the severity or frequency of a symptom or hallmark or the delayed onset or slowing of progression in the severity or frequency of a symptom or hallmark. In certain embodiments, the symptom or hallmark is loss of memory, loss of motor function, and increase in the number and/or volume of neurofibrillary inclusions. The progression or severity of indicators may be determined by subjective or objective measures, which are known to those skilled in the art.

[0036] As used herein, “bicyclic nucleoside” or “BNA” means a nucleoside comprising a bicyclic sugar moiety.

[0037] As used herein, “bicyclic sugar” or “bicyclic sugar moiety” means a modified sugar moiety comprising two rings, wherein the second ring is formed via a bridge connecting two of the atoms in the first ring thereby forming a bicyclic structure. In certain embodiments, the first ring of the bicyclic sugar moiety is a furanosyl moiety. In certain embodiments, the furanosyl sugar moiety is a ribosyl sugar moiety. In certain embodiments, the bicyclic sugar moiety does not comprise a furanosyl moiety.

[0038] As used herein, “blunt” or “blunt ended” in reference to an oligomeric duplex means that there are no terminal unpaired nucleotides (i.e., no overhanging nucleotides). One or both ends of an oligomeric duplex can be blunt.

[0039] As used herein, “cerebrospinal fluid” or “CSF” means the fluid filling the space around the brain and spinal cord. “Artificial cerebrospinal fluid” or “aCSF” means a prepared or manufactured fluid that has certain properties (e.g., osmolarity, pH, and/or electrolytes) of cerebrospinal fluid and is biocompatible with CSF.

[0040] As used herein, “cell-targeting moiety” means a conjugate group or portion of a conjugate group that is capable of binding to a particular cell type or particular cell types.

[0041] As used herein, “cleavable moiety” means a bond or group of atoms that is cleaved under physiological conditions, for example, inside a cell, an animal, or a human.

[0042] As used herein, “complementary” in reference to an oligonucleotide means that at least 70% of the nucleobases of the oligonucleotide or one or more portions thereof and the nucleobases of another nucleic acid or one or more portions thereof are capable of hydrogen bonding with one another when the nucleobase sequence of the oligonucleotide and the other nucleic acid are aligned in opposing directions. As used herein, “complementary nucleobases” means nucleobases that are capable of forming hydrogen bonds with one another. Complementary nucleobase pairs include adenine (A) and thymine (T), adenine (A) and uracil (U), cytosine (C) and guanine (G), 5-methyl cytosine (^{m}C) and guanine (G). Certain modified nucleobases that pair with natural nucleobases or with other modified nucleobases are known in the art and are not considered complementary nucleobases as defined herein unless indicated otherwise. For example, inosine can pair, but is not considered complementary, with adenosine, cytosine, or uracil. Complementary oligonucleotides and/or target nucleic acids need not have nucleobase complementarity at each nucleoside. Rather, some mismatches are tolerated. As used herein, “fully complementary” or “100% complementary” in reference to an oligonucleotide, or a portion thereof, means that the oligonucleotide, or portion thereof, is complementary to another oligonucleotide or nucleic acid at each nucleobase of the shorter of the two oligonucleotides, or at each nucleoside if the oligonucleotides are the same length.

[0043] As used herein, “complementary region” in reference to an oligonucleotide is the range of nucleobases of the oligonucleotide that is complementary with a second oligonucleotide or target nucleic acid. The “complementary region” of an oligonucleotide means that at least 70% of the nucleobases of that region and the nucleobases of another nucleic acid or one or more regions thereof are capable of hydrogen bonding with one another when the nucleobase sequence of the oligonucleotide and the other nucleic acid are aligned in opposing directions.

[0044] As used herein, “conjugate group” means a group of atoms that is directly attached to an oligonucleotide. Conjugate groups include a conjugate moiety and a conjugate linker that attaches the conjugate moiety to the oligonucleotide.

[0045] As used herein, “conjugate linker” means a single bond or a group of atoms comprising at least one bond that connects a conjugate moiety to an oligonucleotide.

[0046] As used herein, “conjugate moiety” means a group of atoms that modifies one or more properties of a molecule compared to the identical molecule lacking the conjugate moiety, including but not limited to pharmacodynamics, pharmacokinetics, stability, binding, absorption, tissue distribution, cellular distribution, cellular uptake, charge and clearance.

[0047] As used herein, “contiguous” in the context of an oligonucleotide refers to nucleosides, nucleobases, sugar moieties, or internucleoside linkages that are immediately adjacent to each other. For example, “contiguous nucleobases” means nucleobases that are immediately adjacent to each other in a sequence.

[0048] As used herein, “constrained ethyl” or “cEt” or “cEt modified sugar moiety” means a β-D ribosyl bicyclic sugar moiety wherein the second ring of the bicyclic sugar is formed via a bridge connecting the 4′-carbon and the 2′-carbon of the β-D ribosyl sugar moiety, wherein the bridge has the formula 4′-CH(CH₃)—O-2′, and wherein the methyl group of the bridge is in the S configuration.

[0049] As used herein, “cEt nucleoside” means a nucleoside comprising cEt modified sugar.

[0050] As used herein, “chirally enriched population” means a plurality of molecules of identical molecular formula, wherein the number or percentage of molecules within the population that contain a particular stereochemical configuration at a particular chiral center is greater than the number or percentage of molecules expected to contain the same particular stereochemical configuration at the same particular chiral center within the population if the particular chiral center were stereorandom as defined herein. Chirally enriched populations of molecules having multiple chiral centers within each molecule may contain one or more stereorandom chiral centers. In certain embodiments, the molecules are modified oligonucleotides. In certain embodiments, the molecules are oligomeric compounds comprising modified oligonucleotides.

[0051] As used herein, “diluent” means an ingredient in a composition that lacks pharmacological activity, but is pharmaceutically necessary or desirable. For example, the diluent in an injected composition can be a liquid, e.g., aCSF, PBS, or saline solution.

[0052] As used herein, “double-stranded” in reference to a region or an oligonucleotide means a duplex formed by complementary strands of nucleic acids (including, but not limited to oligonucleotides) hybridized to one another. In certain embodiments, the two strands of a double-stranded region are separate molecules. In certain embodiments, the two strands are regions of the same molecule that has folded onto itself (e.g., a hairpin structure).

[0053] As used herein, “duplex” or “duplex region” means the structure formed by two oligonucleotides or portions thereof that are hybridized to one another.

[0054] As used herein, “hotspot region” is a range of nucleobases on a target nucleic acid that is amenable to antisense agent-mediated, and in particular RNAi agent-mediated, reduction of the amount or activity of the target nucleic acid.

[0055] As used herein, “hybridization” means the annealing of oligonucleotides and/or nucleic acids. While not limited to a particular mechanism, the most common mechanism of hybridization involves hydrogen bonding, which may be Watson-Crick, Hoogsteen or reversed Hoogsteen hydrogen bonding, between complementary nucleobases. In certain embodiments, complementary nucleic acid molecules include, but are not limited to, an oligomeric duplex and a nucleic acid target. In certain embodiments, complementary nucleic acid molecules include, but are not limited to, an antisense oligonucleotide and a nucleic acid target.

[0056] As used herein, “internucleoside linkage” is the covalent linkage between adjacent nucleosides in an oligonucleotide. As used herein “modified internucleoside linkage” means any internucleoside linkage other than a phosphodiester internucleoside linkage. “Phosphorothioate internucleoside linkage” is a modified internucleoside linkage in which one of the non-bridging oxygen atoms of a phosphodiester internucleoside linkage is replaced with a sulfur atom.

[0057] As used herein, “inverted nucleoside” means a nucleotide having a 3′ to 3′ and/or 5′ to 5′ internucleoside linkage, as shown herein.

[0058] As used herein, “inverted sugar moiety” means the sugar moiety of an inverted nucleoside or an abasic sugar moiety having a 3′ to 3′ and/or 5′ to 5′ internucleoside linkage.

[0059] As used herein, “lipid nanoparticle” or “LNP” is a vesicle comprising a lipid layer encapsulating a pharmaceutically active molecule, such as a nucleic acid molecule, e.g., an RNAi agent or a plasmid from which an RNAi agent is transcribed. LNPs are described in, for example, U.S. Pat. Nos. 6,858,225, 6,815,432, 8,158,601, and 8,058,069, the entire contents of each of which are hereby incorporated herein by reference.

[0060] As used herein, “linked nucleosides” are nucleosides that are connected in a contiguous sequence (i.e., no additional nucleosides are presented between those that are linked).

[0061] As used herein, “linker-nucleoside” means a nucleoside that links, either directly or indirectly, an oligonucleotide to a conjugate moiety. Linker-nucleosides are located within the conjugate linker of an oligomeric compound. Linker-nucleosides are not considered part of the oligonucleotide portion of an oligomeric compound even if they are contiguous with the oligonucleotide.

[0062] As used herein, “mismatch” or “non-complementary” means a nucleobase of a first nucleic acid sequence that is not complementary with the corresponding nucleobase of a second nucleic acid sequence or target nucleic acid when the first and second nucleic acid sequences are aligned.

[0063] As used herein, “modified nucleoside” means a nucleoside comprising a modified nucleobase and/or a modified sugar moiety.

[0064] As used herein, “modified oligonucleotide” means an oligonucleotide, wherein at least one nucleoside or internucleoside linkage is modified. As used herein, “unmodified oligonucleotide” means an oligonucleotide that does not comprise any nucleoside modifications or internucleoside modifications.

[0065] As used herein, “motif” means the pattern of unmodified and/or modified sugar moieties, nucleobases, and/or internucleoside linkages, in an oligonucleotide.

[0066] As used herein, “neurodegenerative disease” means a condition marked by progressive loss of function or structure, including loss of neuronal function and death of neurons. In certain embodiments, the neurodegenerative disease is a tauopathy, Alzheimer's disease, frontotemporal dementia (FTD), FTDP-17, progressive supranuclear palsy (PSP), chronic traumatic encephalopathy (CTE), corticobasal ganglionic degeneration (CBD), epilepsy, or Dravet's Syndrome.

[0067] As used herein, “non-bicyclic modified sugar moiety” means a modified sugar moiety that comprises a modification, such as a substituent, that does not form a bridge between two atoms of the sugar to form a second ring.

[0068] As used herein, “nucleobase” means an unmodified nucleobase or a modified nucleobase. As used herein an “unmodified nucleobase” is adenine (A), thymine (T), cytosine (C), uracil (U), or guanine (G). As used herein, a “modified nucleobase” is a group of atoms other than unmodified A, T, C, U, or G capable of pairing with at least one unmodified nucleobase. A “5-methyl cytosine” is a modified nucleobase. A universal base is a modified nucleobase that can pair with any one of the five unmodified nucleobases.

[0069] As used herein, “nucleobase sequence” means the order of contiguous nucleobases in a target nucleic acid or oligonucleotide independent of any sugar or internucleoside linkage modification.

[0070] As used herein, “nucleoside” means a compound, or a fragment of a compound, comprising a nucleobase and a sugar moiety. The nucleobase and sugar moiety are each, independently, unmodified or modified.

[0071] As used herein, “nucleoside overhang” refers to unpaired nucleotides at either or both ends of an oligomeric duplex formed by hybridization two oligonucleotides.

[0072] As used herein, “oligomeric agent” means an oligomeric compound and optionally one or more additional features, such as a second oligomeric compound. An oligomeric agent may be a single-stranded oligomeric compound or may be an oligomeric duplex formed by two complementary oligomeric compounds.

[0073] As used herein, “oligomeric compound” means an oligonucleotide and optionally one or more additional features, such as a conjugate group or terminal group. An oligomeric compound may be paired with a second oligomeric compound that is complementary to the first oligomeric compound or may be unpaired. A “singled-stranded oligomeric compound” is an unpaired oligomeric compound.

[0074] As used herein, “oligomeric duplex” means a duplex formed by two oligomeric compounds having complementary nucleobase sequences.

[0075] As used herein, “oligonucleotide” means a strand of linked nucleosides connected via internucleoside linkages, wherein each nucleoside and internucleoside linkage may be modified or unmodified. Unless otherwise indicated, oligonucleotides consist of 8-50 linked nucleosides.

[0076] As used herein, “pharmaceutically acceptable carrier or diluent” means any substance suitable for use in administering to an animal. Certain such carriers enable pharmaceutical compositions to be formulated as, for example, tablets, pills, dragees, capsules, liquids, gels, syrups, slurries, suspension and lozenges for the oral ingestion by a subject. In certain embodiments, a pharmaceutically acceptable carrier or diluent is sterile water, sterile saline, sterile buffer solution or sterile artificial cerebrospinal fluid.

[0077] As used herein, “pharmaceutically acceptable salts” means physiologically and pharmaceutically acceptable salts of compounds. Pharmaceutically acceptable salts retain the desired biological activity of the parent compound and do not impart undesired toxicological effects thereto.

[0078] As used herein, “pharmaceutical composition” means a mixture of substances suitable for administering to a subject. For example, a pharmaceutical composition may comprise an oligomeric compound and a sterile aqueous solution. In certain embodiments, a pharmaceutical composition shows activity in free uptake assay in certain cell lines.

[0079] As used herein, “prodrug” means an inactive or less active form of a compound which, when administered to a subject, is metabolized to form the active, or more active, compound. In certain embodiments, a prodrug comprises a cell-targeting moiety and at least one active compound.

[0080] As used herein, “reducing or inhibiting the amount or activity” refers to a reduction or blockade of the transcriptional expression or activity relative to the transcriptional expression or activity in an untreated or control sample and does not necessarily indicate a total elimination of transcriptional expression or activity.

[0081] As used herein, “RNA” means an RNA transcript and includes pre-mRNA and mature mRNA unless otherwise specified.

[0082] As used herein, “RNAi agent” means an antisense agent that acts, at least in part, through RISC or Ago2 to modulate a target nucleic acid and/or protein encoded by a target nucleic acid. RNAi agents include, but are not limited to double-stranded siRNA, single-stranded RNAi (ssRNAi), and microRNA, including microRNA mimics. RNAi agents may comprise conjugate groups and/or terminal groups. In certain embodiments, an RNAi agent modulates the amount, activity, and/or activity of a target nucleic acid. The term RNAi agent excludes antisense compounds that act through RNase H.

[0083] As used herein, “sense compound” means a sense oligonucleotide and optionally one or more additional features, such as a conjugate group.

[0084] As used herein, “sense oligonucleotide” means an oligonucleotide, including the oligonucleotide portion of an sense compound, that is capable of hybridizing to an antisense oligonucleotide. Sense oligonucleotides include but are not limited to sense RNAi oligonucleotides.

[0085] As used herein, “standard in vitro assay” means the assay described in Example 2 and reasonable variations thereof.

[0086] As used herein, “stereorandom” or “stereorandom chiral center” in the context of a population of molecules of identical molecular formula means a chiral center that is not controlled during synthesis, or enriched following synthesis, for a particular absolute stereochemical configuration. The stereochemical configuration of a chiral center is considered random when it is the result of a synthetic method that is not designed to control the stereochemical configuration. For example, in a population of molecules comprising a stereorandom chiral center, the number of molecules having the (S) configuration of the stereorandom chiral center may be but is not necessarily the same as the number of molecules having the (R) configuration of the stereorandom chiral center. In certain embodiments, the stereorandom chiral center is not racemic because one absolute configuration predominates following synthesis, e.g., due to the action of non-chiral reagents near the enriched stereochemistry of an adjacent sugar moiety. In certain embodiments, a stereorandom chiral center is at the phosphorous atom of a stereorandom phosphorothioate or mesyl phosphoroamidate internucleoside linkage. In certain embodiments, a stereorandom chiral center is a stereorandom phosphorothioate internucleoside linkage.

[0087] As used herein, “stabilized phosphate group” means a 5′-phosphate analog that is metabolically more stable than a 5′-phosphate as naturally occurs on DNA or RNA.

[0088] As used herein, “sugar moiety” means an unmodified sugar moiety or a modified sugar moiety. As used herein, “unmodified sugar moiety” means a 2′-OH(H) β-D-ribosyl moiety, as found in RNA (an “unmodified RNA sugar moiety”), or a 2′-H(H) β-D-deoxyribosyl sugar moiety, as found in DNA (an “unmodified DNA sugar moiety”). Unmodified sugar moieties have one hydrogen at each of the 1′, 3′, and 4′ positions, an oxygen at the 3′ position, and two hydrogens at the 5′ position. As used herein, “modified sugar moiety” or “modified sugar” means a modified furanosyl sugar moiety or a sugar surrogate.

[0089] As used herein, “sugar surrogate” means a modified sugar moiety having other than a furanosyl moiety that can link a nucleobase to another group, such as an internucleoside linkage, conjugate group, or terminal group in an oligonucleotide. Modified nucleosides comprising sugar surrogates can be incorporated into one or more positions within an oligonucleotide and such oligonucleotides are capable of hybridizing to complementary oligomeric compounds or target nucleic acids.

[0090] As used herein, “symptom” or “hallmark” means any physical feature or test result that indicates the existence or extent of a disease or disorder. In certain embodiments, a symptom is apparent to a subject or to a medical professional examining or testing the subject. In certain embodiments, a hallmark is apparent upon invasive diagnostic testing, including, but not limited to, post-mortem tests. In certain embodiments, a hallmark is apparent on a brain MRI scan. In certain embodiments, symptoms and hallmarks include loss of memory, loss of motor function, and/or increase in the number and/or volume of neurofibrillary inclusions.

[0091] As used herein, “target nucleic acid” and “target RNA” mean a nucleic acid that an oligomeric compound is designed to affect. Target RNA means an mRNA transcript and includes pre-mRNA and mRNA unless otherwise specified.

[0092] As used herein, “target region” means a portion of a target nucleic acid to which an oligomeric compound is designed to hybridize.

[0093] “Tau-associated disease” means any disease or disorder associated with any tau nucleic acid or expression product thereof. Such diseases may include a neurodegenerative disease. Such neurodegenerative diseases may include tauopathies, Alzheimer's disease, frontotemporal dementia (FTD), FTDP-17, progressive supranuclear palsy (PSP), chronic traumatic encephalopathy (CTE), corticobasal ganglionic degeneration (CBD), epilepsy, and Dravet's Syndrome.

[0094] “Tau RNA” means any messenger RNA (mRNA) expression product of a DNA sequence encoding tau.

[0095] “Tau nucleic acid” means any nucleic acid encoding tau. For example, in certain embodiments, a tau nucleic acid includes a DNA sequence encoding tau, an RNA sequence transcribed from DNA encoding tau (including genomic DNA comprising introns and exons), and an mRNA sequence encoding tau. “Tau mRNA” means an mRNA encoding a tau protein. Tau nucleic acid may also be referred to herein as mammalian microtubule-associated protein tau (MAPT), including human microtubule-associated protein tau (MAPT).

[0096] “Tau protein” means the polypeptide expression product of a tau nucleic acid.

[0097] As used herein, “terminal group” means a chemical group or group of atoms that is covalently linked to a terminus of an oligonucleotide.

[0098] As used herein, “treating” means improving a subject's disease or condition by administering an oligomeric agent or oligomeric compound described herein. In certain embodiments, treating a subject improves a symptom relative to the same symptom in the absence of the treatment. In certain embodiments, treatment reduces in the severity or frequency of a symptom, or delays the onset of a symptom, slows the progression of a symptom, or slows the severity or frequency of a symptom.

[0099] As used herein, “therapeutically effective amount” means an amount of a pharmaceutical agent or composition that provides a therapeutic benefit to an animal. For example, a therapeutically effective amount improves a symptom of a disease.

### CERTAIN EMBODIMENTS

[0100] The present disclosure provides the following non-limiting numbered embodiments:

[0101] Embodiment 1. An oligomeric compound, wherein the oligomeric compound comprises a modified oligonucleotide consisting of 12 to 50 linked nucleosides, wherein the nucleobase sequence of the modified oligonucleotide comprises at least 8, at least 9, at least 10, at least 11, at least 12, at least 13, at least 14, at least 15, at least 16, at least 17, at least 18, at least 19, at least 20, at least 21, at least 22, or 23 contiguous nucleobases of any of the nucleobase sequences of any of SEQ ID NOs: 11-39, 69-112, 157-204, 253-290, 329-375, 423-452, 483-516, 551-580, 611-650, 691-721, 753-898, 1045-1443, and wherein the modified oligonucleotide is an antisense oligonucleotide.

[0102] Embodiment 2. The oligomeric compound of embodiment 1, wherein the nucleobase sequence of the modified oligonucleotide comprises the nucleobase sequence of any of SEQ ID NOs: 11-39, 69-112, 157-204, 253-290, 329-375, 423-452, 483-516, 551-580, 611-650, 691-721, 753-898, 1045-1443.

[0103] Embodiment 3. The oligomeric compound of embodiment 1, wherein the nucleobase sequence of the modified oligonucleotide consists of nucleobase sequence of any SEQ ID NOs: 11-39, 69-112, 157-204, 253-290, 329-375, 423-452, 483-516, 551-580, 611-650, 691-721, 753-898, 1045-1443.

[0104] Embodiment 4. The oligomeric compound of any of embodiments 1-3, wherein the nucleobase sequence of the modified oligonucleotide comprises or consists of the nucleobase sequence selected from SEQ ID NOs: 329, 330, 391, 694, 696, 721, 759, 774, 787, 848, 850, 855, 857-858, 860-861, 863, 884, 886, 890, 891, 1045, 1050, 1115, 1116, 1142, 1157, 1159, 1161, 1166-1167, 1229-1330, 1343, 1360, 1364-1365, 1402, 1430-1431.

[0105] Embodiment 5. The oligomeric compound of any of embodiments 1-4, wherein the nucleobase sequence of the modified oligonucleotide is at least 90%, at least 95%, or 100% complementary to an equal length portion of a tau nucleic acid, wherein the tau nucleic acid has the nucleobase sequence of SEQ ID NO: 1 or SEQ ID NO: 2.

[0106] Embodiment 6. The oligomeric compound of any of embodiments 1-15, wherein the modified oligonucleotide consists of 12 to 20, 12 to 25, 12 to 30, 12 to 50, 13 to 20, 13 to 25, 13 to 30, 13 to 50, 14 to 20, 14 to 25, 14 to 30, 14 to 50, 15 to 20, 15 to 25, 15 to 30, 15 to 50, 16 to 18, 16 to 20, 16 to 25, 16 to 30, 16 to 50, 17 to 20, 17 to 25, 17 to 30, 17 to 50, 18 to 20, 18 to 25, 18 to 30, 18 to 50, 19 to 20, 19 to 25, 19 to 29, 19 to 30, 19 to 50, 20 to 25, 20 to 30, 20 to 50, 21 to 25, 21 to 30, 21 to 50, 22 to 25, 22 to 30, 22 to 50, 23 to 25, 23 to 30, or 23 to 50 linked nucleosides.

[0107] Embodiment 7. The oligomeric compound of any of embodiments 1-6, wherein the modified oligonucleotide consists of 23 linked nucleosides.

[0108] Embodiment 8. The oligomeric compound of any of embodiments 1-7, wherein the nucleobase sequence of the modified oligonucleotide is complementary to at least 8, at least 9, at least 10, at least 11, at least 12, at least 13, at least 14, at least 15, at least 16, at least 17, at least 18, at least 19, at least 20, at least 21, at least 22, or 23 contiguous nucleobases of an equal length portion of nucleobases of 110-142 of SEQ ID NO: 1;
[0109] an equal length portion of nucleobases of 1754-1783 SEQ ID NO: 1;
[0110] an equal length portion of nucleobases of 2332-2362 SEQ ID NO: 1; or
[0111] an equal length portion of nucleobases of 6523-6552 SEQ ID NO: 1.

[0112] Embodiment 9. The oligomeric compound of any of embodiments 1-8, wherein the nucleobase sequence of the modified oligonucleotide is complementary to at least 8, at least 9, at least 10, at least 11, at least 12, at least 13, at least 14, at least 15, at least 16, at least 17, at least 18, at least 19, at least 20, at least 21, at least 22, or 23 contiguous nucleobases of
[0113] SEQ ID NOs: 721, 850, 1115, or 1116;
[0114] SEQ ID NOs: 885, 1142, or 1360;
[0115] SEQ ID NOs: 329, 1045, or 1343; and
[0116] SEQ ID NOs: 890, 1330, or 1431.

[0117] Embodiment 10. The oligomeric compound of any of embodiments 1-8, wherein the nucleobase sequence of the modified oligonucleotide comprises or consists of the nucleobase sequence selected from
[0118] SEQ ID NOs: 721, 850, 1115, or 1116;
[0119] SEQ ID NOs: 885, 1142, or 1360;
[0120] SEQ ID NOs: 329, 1045, or 1343; and
[0121] SEQ ID NOs: 890, 1330, or 1431.

[0122] Embodiment 11. The oligomeric compound of any of embodiments 1-10, wherein at least one nucleoside of the modified oligonucleotide comprises a modified sugar moiety.

[0123] Embodiment 12. The oligomeric compound of embodiment 11, wherein the modified sugar moiety comprises a bicyclic sugar moiety.

[0124] Embodiment 13. The oligomeric compound of embodiment 12, wherein the bicyclic sugar moiety comprises a 2′-4′ bridge, wherein the 2′-4′ bridge is selected from —O—CH₂— and —O—CH(CH₃)—.

[0125] Embodiment 14. The oligomeric compound of embodiment 11, wherein the modified sugar moiety comprises a non-bicyclic modified sugar moiety.

[0126] Embodiment 15. The oligomeric compound of embodiment 14, wherein the non-bicyclic modified sugar moiety is a 2′-MOE sugar moiety, a 2′-OMe sugar moiety, or a 2′-F sugar moiety.

[0127] Embodiment 16. The oligomeric compound of any of embodiments 1-15, wherein at least one nucleoside of the modified oligonucleotide comprises a sugar surrogate.

[0128] Embodiment 17. The oligomeric compound of embodiment 16, wherein the sugar surrogate is selected from morpholino, modified morpholino, glycol nucleic acid (GNA), hexitol nucleic acid (HNA), fluoro-hexitol nucleic acid (F-HNA), and peptide nucleic acid (PNA).

[0129] Embodiment 18. The oligomeric compound of any of embodiments 1-17, wherein the modified oligonucleotide comprises at least one modified internucleoside linkage.

[0130] Embodiment 19. The oligomeric compound of embodiment 18, wherein at least one modified internucleoside linkage is a phosphorothioate internucleoside linkage.

[0131] Embodiment 20. The oligomeric compound of embodiment 19, wherein at least one modified internucleoside linkage is a mesyl phosphoramidate internucleoside linkage.

[0132] Embodiment 21. The oligomeric compound of embodiment 20, wherein each internucleoside linkage is a phosphorothioate internucleoside linkage.

[0133] Embodiment 22. The oligomeric compound of any of embodiments 1-18, wherein each internucleoside linkage of the modified oligonucleotide is independently selected from a phosphodiester internucleoside linkage and a phosphorothioate internucleoside linkage.

[0134] Embodiment 23. The oligomeric compound of any of embodiments 1-18, wherein each internucleoside linkage of the modified oligonucleotide is independently selected from a phosphodiester internucleoside linkage, a phosphorothioate internucleoside linkage, and a mesyl phosphoramidate internucleoside linkage.

[0135] Embodiment 24. The oligomeric compound of any of embodiments 1-18, wherein each internucleoside linkage of the modified oligonucleotide is independently selected from a phosphorothioate internucleoside linkage and a mesyl phosphoramidate internucleoside linkage.

[0136] Embodiment 25. The oligomeric compound of any of embodiments 1-24, wherein the modified oligonucleotide has an internucleoside linkage motif of ssooooooooooooooooooss, wherein “s” is a phosphorothioate internucleoside linkage and “o” is a phosphodiester internucleoside linkage.

[0137] Embodiment 26. The oligomeric compound of any of embodiments 1-25, wherein the modified oligonucleotide comprises at least one modified nucleobase.

[0138] Embodiment 27. The oligomeric compound of embodiment 26, wherein the modified nucleobase is 5-methylcytosine.

[0139] Embodiment 28. The oligomeric compound of embodiment 27, wherein each cytosine is a 5-methylcytosine.

[0140] Embodiment 29. An oligomeric compound of any of embodiments 1-28, wherein the modified oligonucleotide has a sugar motif (5′ to 3′) of yfyfyfyfyfyfyfyfyfyfyyy or yfyyyfyyyyyyyfyfyyyyyyy, wherein each “y” represents a 2′-OMe sugar moiety and each “f” represents a 2′-F sugar moiety.

[0141] Embodiment 30. The oligomeric compound of any one of embodiments 1-29, wherein the oligomeric compound comprises a conjugate group.

[0142] Embodiment 31. The oligomeric compound of embodiment 30, wherein the conjugate group comprises a conjugate moiety and a conjugate linker.

[0143] Embodiment 32. The oligomeric compound of embodiment 31, wherein the conjugate moiety is a lipophilic group.

[0144] Embodiment 33. The oligomeric compound of embodiment 31, wherein the conjugate moiety is selected from a C22 alkyl, C20 alkyl, C16 alkyl, C10 alkyl, C21 alkyl, C19 alkyl, C18 alkyl, C17 alkyl, C15 alkyl, C14 alkyl, C13 alkyl, C12 alkyl, C11 alkyl, C9 alkyl, C8 alkyl, C7 alkyl, C6 alkyl, C5 alkyl, C22 alkenyl, C20 alkenyl, C16 alkenyl, C10 alkenyl, C21 alkenyl, C19 alkenyl, C18 alkenyl, C17 alkenyl, C15 alkenyl, C14 alkenyl, C13 alkenyl, C12 alkenyl, C11 alkenyl, C9 alkenyl, C8 alkenyl, C7 alkenyl, C6 alkenyl, or C5 alkenyl.

[0145] Embodiment 34. The oligomeric compound of any of embodiments 31-33, wherein the conjugate linker consists of a single bond.

[0146] Embodiment 35. The oligomeric compound of any of embodiments 31-33, wherein the conjugate linker is cleavable.

[0147] Embodiment 36. The oligomeric compound of any of embodiments 1-335, comprising a terminal group.

[0148] Embodiment 37. An oligomeric duplex, comprising a first oligomeric compound comprising a first modified oligonucleotide and a second oligomeric compound comprising a second modified oligonucleotide, wherein the first oligomeric compound is an oligomeric compound of any of embodiments 1-36.

[0149] Embodiment 38. The oligomeric duplex of embodiment 37, wherein the second modified oligonucleotide consists of 8 to 80 linked nucleosides, and wherein the nucleobase sequence of the second modified oligonucleotide comprises a complementary region of at least 8 nucleobases that is at least 90% complementary to an equal length portion of the first modified oligonucleotide.

[0150] Embodiment 39. An oligomeric duplex comprising:
[0151] a first oligomeric compound comprising a first modified oligonucleotide consisting of 15 to 30 linked nucleosides, wherein the nucleobase sequence of the first modified oligonucleotide comprises at least 12, at least 13, at least 14, at least 15, at least 16, at least 17, at least 18, at least 19, at least 20, at least 21, at least 22, or at least 23 contiguous nucleobases of the nucleobase sequence of any of SEQ ID NOs: 11-39, 69-112, 157-204, 253-290, 329-375, 423-452, 483-516, 551-580, 611-650, 691-721, 753-898, 1045-1443; and
[0152] a second oligomeric compound comprising a second modified oligonucleotide consisting of 15 to 29 linked nucleosides, wherein the nucleobase sequence of the second modified oligonucleotide comprises a complementary region of at least 8 nucleobases that is at least 90% complementary to an equal length portion of the first modified oligonucleotide.

[0153] Embodiment 40. An oligomeric duplex comprising:
[0154] a first oligomeric compound comprising a first modified oligonucleotide consisting of 15 to 30 linked nucleosides, wherein the nucleobase sequence of the first modified oligonucleotide comprises at least 8, at least 9, at least 10, at least 11, at least 12, at least 13, at least 14, at least 15, at least 16, at least 17, at least 18, at least 19, at least 20, at least 21, at least 22, or 23 contiguous nucleobases of the nucleobase sequence of any of SEQ ID NOs: 11-39, 69-112, 157-204, 253-290, 329-375, 423-452, 483-516, 551-580, 611-650, 691-721, 753-898, 1045-1443; and
[0155] a second oligomeric compound comprising a second modified oligonucleotide consisting of 15 to 29 linked nucleosides, wherein the nucleobase sequence of the second modified oligonucleotide comprises at least 8, at least 9, at least 10, at least 11, at least 12, at least 13, at least 14, at least 15, at least 16, at least 17, at least 18, at least 19, at least 20, or 21 contiguous nucleobases of the nucleobase sequence of any of SEQ ID NOs: 40-68, 113-156, 205-252, 291-328, 376-422, 453-482, 517-550, 581-610, 651-690, 722-752, 899-1044, 1444-1842, wherein the nucleobase sequence of the second modified oligonucleotide is at least 90% complementary to an equal length portion of the first modified oligonucleotide.

[0156] Embodiment 41. An oligomeric duplex comprising:
[0157] a first oligomeric compound comprising a first modified oligonucleotide consisting of 23 linked nucleosides, wherein the nucleobase sequence of the first modified oligonucleotide consists of the nucleobase sequence of any of SEQ ID NOs: 11-39, 69-112, 157-204, 253-290, 329-375, 423-452, 483-516, 551-580, 611-650, 691-721, 753-898, 1045-1443; and
[0158] a second oligomeric compound comprising a second modified oligonucleotide consisting of 21 linked nucleosides, wherein the nucleobase sequence of the second modified oligonucleotide consists of the nucleobase sequence of any of SEQ ID NOs: 40-68, 113-156, 205-252, 291-328, 376-422, 453-482, 517-550, 581-610, 651-690, 722-752, 899-1044, 1444-1842, and wherein the nucleobase sequence of the second modified oligonucleotide is at least 90% complementary to an equal length portion of the first modified oligonucleotide.

[0159] Embodiment 42. The oligomeric duplex of any of embodiments 39-41, wherein the first modified oligonucleotide comprises a 5′-stabilized phosphate group.

[0160] Embodiment 43. The oligomeric duplex of embodiment 42, wherein the 5′-stabilized phosphate group comprises a cyclopropyl phosphonate or a vinyl phosphonate.

[0161] Embodiment 44. The oligomeric duplex of any of embodiments 39-43, wherein the first modified oligonucleotide comprises a glycol nucleic acid (GNA) sugar surrogate.

[0162] Embodiment 45. The oligomeric duplex of any of embodiments 39-44, wherein the first modified oligonucleotide comprises a 2′-NMA sugar moiety.

[0163] Embodiment 46. The oligomeric duplex of any of embodiments 39-45, wherein at least one nucleoside of the second modified oligonucleotide comprises a modified sugar moiety.

[0164] Embodiment 47. The oligomeric duplex of embodiment 39-46, wherein the modified sugar moiety of the second modified oligonucleotide comprises a bicyclic sugar moiety.

[0165] Embodiment 48. The oligomeric duplex of embodiment 39-47, wherein the bicyclic sugar moiety of the second modified oligonucleotide comprises a 2′-4′ bridge selected from —O—CH₂— and —O—CH(CH₃)—.

[0166] Embodiment 49. The oligomeric duplex of embodiment 39-48, wherein the modified sugar moiety of the second modified oligonucleotide comprises a non-bicyclic modified sugar moiety.

[0167] Embodiment 50. The oligomeric duplex of embodiment 49, wherein the non-bicyclic modified sugar moiety of the second modified oligonucleotide is a 2′-MOE sugar moiety, a 2′-F sugar moiety, or 2′-OMe sugar moiety.

[0168] Embodiment 51. The oligomeric duplex of any of embodiments 39-50, wherein at least one nucleoside of the second modified oligonucleotide comprises a sugar surrogate.

[0169] Embodiment 52. The oligomeric duplex of any of embodiments 39-51, wherein the second modified oligonucleotide comprises at least one modified internucleoside linkage.

[0170] Embodiment 53. The oligomeric duplex of embodiment 52, wherein the at least one modified internucleoside linkage of the second modified oligonucleotide is a phosphorothioate internucleoside linkage.

[0171] Embodiment 54. The oligomeric duplex of any of embodiments 39-52, wherein the second modified oligonucleotide comprises at least one phosphodiester internucleoside linkage.

[0172] Embodiment 55. The oligomeric duplex of any of embodiments 39-52, wherein each internucleoside linkage of the second modified oligonucleotide is independently selected from a phosphodiester internucleoside linkage or a phosphorothioate internucleoside linkage.

[0173] Embodiment 56. The oligomeric duplex of any of embodiments 39-52, wherein the internucleoside linkage motif of the first modified oligonucleotide is ssooooooooooooooooooss and the internucleoside linkage motif of the second modified oligonucleotide is ssooooooooooooooooss, wherein each “o” represents a phosphodiester internucleoside linkage and each “s” represents a phosphorothioate internucleoside linkage.

[0174] Embodiment 57. The oligomeric duplex of any of embodiments 39-56, wherein the second modified oligonucleotide comprises at least one modified nucleobase.

[0175] Embodiment 58. The oligomeric duplex of embodiment 57, wherein the modified nucleobase of the second modified oligonucleotide is 5-methylcytosine.

[0176] Embodiment 59. The oligomeric duplex of any of embodiments 39-58, wherein the second modified oligonucleotide comprises a conjugate group.

[0177] Embodiment 60. The oligomeric duplex of embodiment 59, wherein the conjugate group comprises a conjugate linker and a conjugate moiety.

[0178] Embodiment 61. The oligomeric duplex of embodiment 59 or 60, wherein the conjugate group is attached to the second modified oligonucleotide at the 5′-end of the second modified oligonucleotide.

[0179] Embodiment 62. The oligomeric duplex of embodiment 59 or 60, wherein the conjugate group is attached to the second modified oligonucleotide at the 3′-end of the second modified oligonucleotide.

[0180] Embodiment 63. The oligomeric duplex of any of embodiments 59-62, wherein the conjugate group comprises a C22 alkyl, C20 alkyl, C16 alkyl, C10 alkyl, C21 alkyl, C19 alkyl, C18 alkyl, C17 alkyl, C15 alkyl, C14 alkyl, C13 alkyl, C12 alkyl, C11 alkyl, C9 alkyl, C8 alkyl, C7 alkyl, C6 alkyl, C5 alkyl, C22 alkenyl, C20 alkenyl, C16 alkenyl, C10 alkenyl, C21 alkenyl, C19 alkenyl, C18 alkenyl, C17 alkenyl, C15 alkenyl, C14 alkenyl, C13 alkenyl, C12 alkenyl, C11 alkenyl, C9 alkenyl, C8 alkenyl, C7 alkenyl, C6 alkenyl, or C5 alkenyl.

[0181] Embodiment 64. The oligomeric duplex of any of embodiments 39-63, wherein the second modified oligonucleotide comprises a terminal group.

[0182] Embodiment 65. The oligomeric duplex of embodiment 64, wherein the terminal group is an abasic sugar moiety.

[0183] Embodiment 66. The oligomeric duplex of any of embodiments 39-65, wherein the second modified oligonucleotide consists of 10 to 25, 10 to 30, 10 to 50, 12 to 20, 12 to 25, 12 to 30, 12 to 50, 13 to 20, 13 to 25, 13 to 30, 13 to 50, 14 to 20, 14 to 25, 14 to 30, 14 to 50, 15 to 20, 15 to 25, 15 to 30, 15 to 50, 16 to 18, 16 to 20, 16 to 25, 16 to 30, 16 to 50, 17 to 20, 17 to 25, 17 to 30, 17 to 50, 18 to 20, 18 to 25, 18 to 30, 18 to 50, 19 to 20, 19 to 25, 19 to 30, 19 to 50, 20 to 25, 20 to 30, 20 to 50, 21 to 25, 21 to 30, 21 to 50, 22 to 25, 22 to 30, 22 to 50, 23 to 25, 23 to 30, or 23 to 50 linked nucleosides.

[0184] Embodiment 67. The oligomeric duplex of any of embodiments 39-66, wherein the first modified oligonucleotide consists of 23 linked nucleosides and the second modified oligonucleotide consists of 21 linked nucleosides.

[0185] Embodiment 68. The oligomeric duplex of embodiment 67, wherein the modified oligonucleotide of the first oligomeric compound has a sugar motif (from 5′ to 3′) of yfyfyfyfyfyfyfyfyfyfyyy and the second modified oligonucleotide has a sugar motif (from 5′ to 3′) of fyfyfyfyfyfyfyfyfyfyf, wherein each “y” represents a 2′-OMe sugar moiety and each “f” represents a 2′-F sugar moiety.

[0186] Embodiment 69. The oligomeric duplex of claim 67, wherein the modified oligonucleotide of the first oligomeric compound has a sugar motif (from 5′ to 3′) of: yfyyyfyyyyyyyfyfyyyyyyy and the second modified oligonucleotide has a sugar motif (from 5′ to 3′) of yyyyyyfyfffyyyyyyyyyy, wherein each “y” represents a 2′-OMe sugar moiety and each “f” represents a 2′-F sugar moiety.

[0187] Embodiment 70. An antisense agent, wherein the antisense agent is the oligomeric duplex of any of embodiments 37-69.

[0188] Embodiment 71. The antisense agent of embodiment 70, wherein the antisense agent is an RNAi agent capable of reducing the amount of tau nucleic acid through the activation of RISC/Ago2.

[0189] Embodiment 72. A chirally enriched population of oligomeric duplexes of embodiments 37-69, wherein the population is enriched for modified oligonucleotides comprising at least one particular phosphorothioate internucleoside linkage having a particular stereochemical configuration.

[0190] Embodiment 73. The chirally enriched population of embodiment 72, wherein the population is enriched for modified oligonucleotides having a particular, independently selected stereochemical configuration at each phosphorothioate internucleoside linkage.

[0191] Embodiment 74. The chirally enriched population of embodiment 73, wherein the population is enriched for modified oligonucleotides having the (Rp) configuration at one particular phosphorothioate internucleoside linkage and the (Sp) configuration at each of the remaining phosphorothioate internucleoside linkages.

[0192] Embodiment 75. A population of oligomeric duplexes comprising modified oligonucleotides of any of embodiments 37-69, wherein all of the phosphorothioate internucleoside linkages of the modified oligonucleotides are stereorandom.

[0193] Embodiment 76. A pharmaceutical composition comprising the oligomeric compound of any of embodiments 1-36, the oligomeric duplex of any of embodiments 37-69, the antisense agent of any of embodiments 70-71, or the population of any of embodiments 72-75, and a pharmaceutically acceptable diluent or carrier.

[0194] Embodiment 77. The pharmaceutical composition of embodiment 76, wherein the pharmaceutically acceptable diluent is phosphate buffered saline or artificial cerebrospinal fluid.

[0195] Embodiment 78. The pharmaceutical composition of embodiment 777, wherein the pharmaceutical composition consists essentially of the oligomeric compound, the oligomeric duplex, the antisense agent, or the population, and phosphate buffered saline or artificial cerebrospinal fluid.

[0196] Embodiment 79. A method comprising administering to an animal the oligomeric compound of any of embodiments 1-36, the oligomeric duplex of any of embodiments 37-69, the antisense agent of any of embodiments 70-71, the population of any of embodiments 72-75, or the pharmaceutical composition of any of embodiments 76-78.

[0197] Embodiment 80. The method of embodiment 79, wherein the animal has a tau-associated disease.

[0198] Embodiment 81. The method of embodiment 79 or embodiment 80, wherein the disease associated with tau is a tauopathy, Alzheimer's disease, frontotemporal dementia (FTD), frontotemporal dementia with parkinsonism-17 (FTDP-17), progressive supranuclear palsy (PSP), chronic traumatic encephalopathy (CTE), corticobasal ganglionic degeneration (CBD), epilepsy, or Dravet's Syndrome.

[0199] Embodiment 82. A method of treating a tau-associated disease comprising administering to an individual having or at risk for developing the tau-associated disease a therapeutically effective amount of the oligomeric compound of any of embodiments 1-36, the oligomeric duplex of any of embodiments 37-69, the antisense agent of any of embodiments 70-71, the population of any of embodiments 72-75, or the pharmaceutical composition according to any of embodiments 76-78 and thereby treating the tau-associated disease.

[0200] Embodiment 83. The method of embodiment 82, wherein the tau-associated disease is a tauopathy, Alzheimer's disease, frontotemporal dementia (FTD), frontotemporal dementia with parkinsonism-17 (FTDP-17), progressive supranuclear palsy (PSP), chronic traumatic encephalopathy (CTE), corticobasal ganglionic degeneration (CBD), epilepsy, or Dravet's Syndrome.

[0201] Embodiment 84. The method of embodiment 82 or embodiment 83, wherein the tau-associated disease is a tauopathy.

[0202] Embodiment 85. The method of embodiment 82 or embodiment 83, wherein the tau-associated disease is Alzheimer's disease.

[0203] Embodiment 86. The method of embodiment 82 or embodiment 83, wherein the tau-associated disease is frontotemporal dementia (FTD.

[0204] Embodiment 87. The method of embodiment 82 or embodiment 83, wherein the tau-associated disease is FTDP-17.

[0205] Embodiment 88. The method of embodiment 82 or embodiment 83, wherein the tau-associated disease is progressive supranuclear palsy (PSP).

[0206] Embodiment 89. The method of embodiment 82 or embodiment 83, wherein the tau-associated disease is chronic traumatic encephalopathy (CTE).

[0207] Embodiment 90. The method of embodiment 82 or embodiment 83, wherein the tau-associated disease is corticobasal ganglionic degeneration (CBD).

[0208] Embodiment 91. The method of embodiment 82 or embodiment 83, wherein the tau-associated disease is epilepsy.

[0209] Embodiment 92. The method of embodiment 82 or embodiment 83, wherein the tau-associated disease is Dravet's Syndrome.

[0210] Embodiment 93. The method of any of embodiments 83-92, wherein at least one symptom or hallmark of the tau-associated disease is ameliorated.

[0211] Embodiment 94. The method of embodiment 93, wherein the symptom or hallmark is loss of memory, loss of motor function, and/or an increase in the number and/or volume of neurofibrillary inclusions.

[0212] Embodiment 95. A method of reducing tau in a cell comprising contacting the cell with the oligomeric compound of any of embodiments 1-36, the oligomeric duplex of any of embodiments 37-69, the antisense agent of any of embodiments 70-71, the population of any of embodiments 72-75, or the pharmaceutical composition according to any of embodiments 76-78.

[0213] Embodiment 96. The method of embodiment 95, wherein the cell is a central nervous system cell.

[0214] Embodiment 97. The method of any of embodiments 95-96, wherein the cell is a human cell.

[0215] Embodiment 98. Use of the oligomeric compound of any of embodiments 1-36, the oligomeric duplex of any of embodiments 37-69, the antisense agent of any of embodiments 70-71, the population of any of embodiments 72-75, or the pharmaceutical composition according to any of embodiments 76-78, for treating a tau-associated disease.

[0216] Embodiment 99. Use of the oligomeric compound of any of embodiments 1-36, the oligomeric duplex of any of embodiments 37-69, the antisense agent of any of embodiments 70-71, the population of any of embodiments 72-75, or the pharmaceutical composition according to any of embodiments 76-78, for the manufacture of a medicament for treating a tau-associated disease.

[0217] Embodiment 100. The use of embodiments 98 or embodiment 99, wherein the tau-associated disease is a tauopathy, Alzheimer's disease, frontotemporal dementia (FTD), frontotemporal dementia with parkinsonism-17 (FTDP-17), progressive supranuclear palsy (PSP), chronic traumatic encephalopathy (CTE), corticobasal ganglionic degeneration (CBD), epilepsy, or Dravet's Syndrome.

[0218] Embodiment 101. The use of any of embodiments 98-100, wherein at least one symptom or hallmark is ameliorated.

[0219] Embodiment 102. The use of embodiment 101, wherein the at least one symptom or hallmark is loss of memory, loss of motor function, or an increase in the number and/or volume of neurofibrillary inclusions.

[0220] Embodiment 103. The use of any of embodiments 98-102, wherein the use of the oligomeric compound, the oligomeric duplex, the antisense agent, the population, or the pharmaceutical composition improves motor function, reduces the amount or volume of alpha-synuclein aggregates, reduces or delays neurodegeneration, improves cognitive function, or delays the onset or progression of dementia.

### I. Certain Oligonucleotides

[0221] Provided herein are oligomeric agents comprising antisense oligonucleotides complementary to a tau nucleic acid and optionally, sense oligonucleotides complementary to the antisense oligonucleotides. Antisense oligonucleotides and sense oligonucleotides typically comprise at least one modified nucleoside and/or at least one modified internucleoside linkage. Certain modified nucleosides and modified internucleoside linkages suitable for use in antisense oligonucleotides and/or sense oligonucleotides are described below.

### A. Certain Modified Nucleosides

[0222] Modified nucleosides comprise a modified sugar moiety or a modified nucleobase or both a modified sugar moiety and a modified nucleobase. Modified nucleosides comprising the following modified sugar moieties and/or the following modified nucleobases may be incorporated into antisense oligonucleotides and/or sense oligonucleotides.

### 1. Certain Modified Sugar Moieties

[0223] In certain embodiments, sugar moieties are non-bicyclic modified sugar moieties. In certain embodiments, modified sugar moieties are bicyclic or tricyclic sugar moieties. In certain embodiments, modified sugar moieties are sugar surrogates. Such sugar surrogates may comprise one or more substitutions corresponding to those of other types of modified sugar moieties.

[0224] In certain embodiments, modified sugar moieties are non-bicyclic modified furanosyl sugar moieties comprising one or more acyclic substituent, including, but not limited, to substituents at the 2′, 3′, 4′, and/or 5′ positions. In certain embodiments, the furanosyl sugar moiety is a ribosyl sugar moiety. In certain embodiments, one or more acyclic substituent of non-bicyclic modified sugar moieties is branched.

[0225] In certain embodiments, non-bicyclic modified sugar moieties comprise a substituent group at the 2′-position. Examples of substituent groups suitable for the 2′-position of modified sugar moieties include but are not limited to: —F, —OCH₃ (“OMe” or “O-methyl”), and —O(CH₂)₂OCH₃ (“MOE”). In certain embodiments, 2′-substituent groups are selected from among: halo, allyl, amino, azido, SH, CN, OCN, CF₃, OCF₃, O—C₁-C₁₀ alkoxy, O—C₁-C₁₀ substituted alkoxy, O—C₁-C₁₀ alkyl, O—C₁-C₁₀ substituted alkyl, S-alkyl, N(Rₘ)-alkyl, O-alkenyl, S-alkenyl, N(Rₘ)-alkenyl, O-alkynyl, S-alkynyl, N(Rₘ)-alkynyl, O-alkylenyl-O-alkyl, alkynyl, alkaryl, aralkyl, O-alkaryl, O-aralkyl, O(CH₂)₂SCH₃, O(CH₂)₂ON(Rₘ)(Rₙ) or OCH₂C(═O)—N(Rₘ)(Rₙ), where each Rₘ and Rₙ is, independently, H, an amino protecting group, or substituted or unsubstituted C₁-C₁₀ alkyl, —O(CH₂)₂ON(CH₃)₂ (“DMAOE”), 2′-O(CH₂)₂O(CH₂)₂N(CH₃)₂ (“DMAEOE”), and the 2′-substituent groups described in Cook et al., U.S. Pat. No. 6,531,584; Cook et al., U.S. Pat. No. 5,859,221; and Cook et al., U.S. Pat. No. 6,005,087. Certain embodiments of these 2′-substituent groups can be further substituted with one or more substituent groups independently selected from among: hydroxyl, amino, alkoxy, carboxy, benzyl, phenyl, nitro (NO₂), thiol, thioalkoxy, thioalkyl, halogen, alkyl, aryl, alkenyl and alkynyl.

[0226] In certain embodiments, a 2′-substituted non-bicyclic modified nucleoside comprises a sugar moiety comprising a non-bridging 2′-substituent group selected from: F, NH₂, N₃, OCF₃, OCH₃, O(CH₂)₃NH₂, CH₂CH═CH₂, OCH₂CH═CH₂, O(CH₂)₂OCH₃, O(CH₂)₂SCH₃, O(CH₂)₂ON(Rₘ)(Rₙ), O(CH₂)₂O(CH₂)₂N(CH₃)₂, and N-substituted acetamide (OCH₂C(═O)—N(Rₘ)(Rₙ)), where each Rₘ and Rₙ is, independently, H, an amino protecting group, or substituted or unsubstituted C₁-C₁₀ alkyl. In certain embodiments, a 2′-substituted non-bicyclic modified nucleoside comprises a sugar moiety comprising a non-bridging 2′-substituent group selected from F, OCH₃, O(CH₂)₂OCH₃, O(CH₂)₂SCH₃, O(CH₂)₂ON(CH₃)₂, O(CH₂)₂O(CH₂)₂N(CH₃)₂, and OCH₂C(═O)—N(H)CH₃ (“NMA”). In certain embodiments, a 2′-substituted sugar moiety of a modified nucleoside comprises a 2′-substituent group selected from: F, OCF₃, OCH₃, OCH₂CH₂OCH₃, O(CH₂)₂SCH₃, O(CH₂)₂ON(CH₃)₂ (“DMAOE”), O(CH₂)₂O(CH₂)₂N(CH₃)₂ (“DMAEOE”), and OCH₂C(═O)—N(H)CH₃ (“NMA”).

[0227] In certain embodiments, a 2′-substituted sugar moiety of a modified nucleoside comprises 2′-substituent group selected from F, OCH₃, and OCH₂CH₂OCH₃.

[0228] In certain embodiments, modified furanosyl sugar moieties and nucleosides incorporating such modified furanosyl sugar moieties are further defined by isomeric configuration. For example, a 2′-deoxyfuranosyl sugar moiety may be in seven isomeric configurations other than the naturally occurring β-D-deoxyribosyl configuration. Such modified sugar moieties are described in, e.g., WO 2019/157531, incorporated by reference herein. A 2′-modified sugar moiety has an additional stereocenter at the 2′-position relative to a 2′-deoxyfuranosyl sugar moiety; therefore, such sugar moieties have a total of sixteen possible isomeric configurations. Modified furanosyl sugar moieties described herein are in the β-D-ribosyl isomeric configuration unless otherwise specified.

[0229] In certain embodiments, non-bicyclic modified sugar moieties comprise a substituent group at the 4′-position. Examples of substituent groups suitable for the 4′-position of modified sugar moieties include but are not limited to alkoxy (e.g., methoxy), alkyl, and those described in Manoharan et al., WO 2015/106128.

[0230] In certain embodiments, non-bicyclic modified sugar moieties comprise a substituent group at the 3′-position. Examples of substituent groups suitable for the 3′-position of modified sugar moieties include but are not limited to alkoxy (e.g., methoxy), alkyl (e.g., methyl, ethyl).

[0231] In certain embodiments, non-bicyclic modified sugar moieties comprise a substituent group at the 5′-position. Examples of substituent groups suitable for the 5′-position of modified sugar moieties include but are not limited to vinyl, alkoxy (e.g., methoxy), alkyl (e.g., methyl (R or S), ethyl).

[0232] In certain embodiments, non-bicyclic modified sugar moieties comprise more than one non-bridging sugar substituent, for example, 2′-F-5′-methyl sugar moieties and the modified sugar moieties and modified nucleosides described in Migawa et al., WO 2008/101157 and Rajeev et al., US2013/0203836).

[0233] In naturally occurring nucleic acids, sugars are linked to one another 3′ to 5′. In certain embodiments, oligonucleotides include one or more nucleoside or sugar moiety linked at an alternative position, for example at the 2′ or inverted 5′ to 3′. For example, where the linkage is at the 2′ position, the 2′-substituent groups may instead be at the 3′-position.

[0234] Certain modified sugar moieties comprise a bridging sugar substituent that forms a second ring resulting in a bicyclic sugar moiety. Nucleosides comprising such bicyclic sugar moieties have been referred to as bicyclic nucleosides (BNAs), locked nucleosides, or conformationally restricted nucleotides (CRN). Certain such compounds are described in US Patent Publication No. 2013/0190383; and PCT publication WO 2013/036868. In certain such embodiments, the bicyclic sugar moiety comprises a bridge between the 4′ and the 2′ furanose ring atoms. In certain such embodiments, the furanose ring is a ribose ring. Examples of such 4′ to 2′ bridging sugar substituents include, but are not limited to: 4′-CH₂-2′, 4′-(CH₂)₂-2′, 4′-(CH₂)₃-2′, 4′-CH₂—O-2′ (“LNA”), 4′-CH₂—S-2′, 4′-(CH₂)₂—O-2′ (“ENA”), 4′-CH(CH₃)—O-2′ (referred to as “constrained ethyl” or “cEt” when in the S configuration), 4′-CH₂—O—CH₂-2′, 4′-CH₂—N(R)-2′, 4′-CH(CH₂OCH₃)—O-2′ (“constrained MOE” or “cMOE”) and analogs thereof (see, e.g., Seth et al., U.S. Pat. No. 7,399,845, Bhat et al., U.S. Pat. No. 7,569,686, Swayze et al., U.S. Pat. No. 7,741,457, and Swayze et al., U.S. Pat. No. 8,022,193), 4′-C(CH₃)(CH₃)—O-2′ and analogs thereof (see, e.g., Seth et al., U.S. Pat. No. 8,278,283), 4′-CH₂—N(OCH₃)-2′ and analogs thereof (see, e.g., Prakash et al., U.S. Pat. No. 8,278,425), 4′-CH₂—O—N(CH₃)-2′ (see, e.g., Allerson et al., U.S. Pat. No. 7,696,345 and Allerson et al., U.S. Pat. No. 8,124,745), 4′-CH₂—C(H)(CH₃)-2′ (see, e.g., Zhou, et al., J. Org. Chem., 2009, 74, 118-134), 4′-CH₂—C(═CH₂)-2′ and analogs thereof (see e.g., Seth et al., U.S. Pat. No. 8,278,426), 4′-C(RₐR_{b})—N(R)—O-2′, 4′-C(RₐR_{b})—O—N(R)-2′, 4′-CH₂—O—N(R)-2′, and 4′-CH₂—N(R)—O-2′, wherein each R, Rₐ, and R_{b} is, independently, H, a protecting group, or C₁-C₁₂ alkyl (see, e.g. Imanishi et al., U.S. Pat. No. 7,427,672).

[0235] In certain embodiments, such 4′ to 2′ bridges independently comprise from 1 to 4 linked groups independently selected from: —[C(Rₐ)(R_{b})]ₙ—, —[C(Rₐ)(R_{b})]ₙO—, —C(Rₐ)═C(R_{b})—, —C(Rₐ)═N—, —C(═NRₐ)—, —C(═O)—, —C(═S)—, —O—, —Si(Rₐ)₂—, —S(═O)ₓ—, and —N(Rₐ)—;
[0236] wherein:
[0237] x is 0, 1, or 2;
[0238] n is 1, 2, 3, or 4;
[0239] each Rₐ and R_{b} is, independently, H, a protecting group, hydroxyl, C₁-C₁₂ alkyl, substituted C₁-C₁₂ alkyl, C₂-C₁₂ alkenyl, substituted C₂-C₁₂ alkenyl, C₂-C₁₂ alkynyl, substituted C₂-C₁₂ alkynyl, C₅-C₂₀ aryl, substituted C₅-C₂₀ aryl, heterocycle radical, substituted heterocycle radical, heteroaryl, substituted heteroaryl, C₅-C₇ alicyclic radical, substituted C₅-C₇ alicyclic radical, halogen, OJ₁, NJ₁J₂, SJ₁, N₃, COOJ₁, acyl (C(═O)—H), substituted acyl, CN, sulfonyl (S(═O)₂-J₁), or sulfoxyl (S(═O)-J₁); and each J₁ and J₂ is, independently, H, C₁-C₁₂ alkyl, substituted C₁-C₁₂ alkyl, C₂-C₁₂ alkenyl, substituted C₂-C₁₂ alkenyl, C₂-C₁₂ alkynyl, substituted C₂-C₁₂ alkynyl, C₅-C₂₀ aryl, substituted C₅-C₂₀ aryl, acyl (C(═O)—H), substituted acyl, a heterocycle radical, a substituted heterocycle radical, C₁-C₁₂ aminoalkyl, substituted C₁-C₁₂ aminoalkyl, or a protecting group.

[0240] Additional bicyclic sugar moieties are known in the art, see, for example: Freier et al., Nucleic Acids Research, 1997, 25(22), 4429-4443, Albaek et al., J Org. Chem., 2006, 71, 7731-7740, Singh et al., Chem. Commun., 1998, 4, 455-456; Koshkin et al., Tetrahedron, 1998, 54, 3607-3630; Wahlestedt et al., Proc. Natl. Acad. Sci. U.S.A., 2000, 97, 5633-5638; Kumar et al., Bioorg. Med. Chem. Lett., 1998, 8, 2219-2222; Singh et al., J Org. Chem., 1998, 63, 10035-10039; Srivastava et al., J. Am. Chem. Soc., 2007, 129, 8362-8379; Elayadi et al., Curr. Opinion Invens. Drugs, 2001, 2, 558-561; Braasch et al., Chem. Biol., 2001, 8, 1-7; Orum et al., Curr. Opinion Mol. Ther., 2001, 3, 239-243; Wengel et al., U.S. Pat. No. 7,053,207, Imanishi et al., U.S. Pat. No. 6,268,490, Imanishi et al. U.S. Pat. No. 6,770,748, Imanishi et al., U.S. RE44,779; Wengel et al., U.S. Pat. No. 6,794,499, Wengel et al., U.S. Pat. No. 6,670,461; Wengel et al., U.S. Pat. No. 7,034,133, Wengel et al., U.S. Pat. No. 8,080,644; Wengel et al., U.S. Pat. No. 8,034,909; Wengel et al., U.S. Pat. No. 8,153,365; Wengel et al., U.S. Pat. No. 7,572,582; and Ramasamy et al., U.S. Pat. No. 6,525,191, Torsten et al., WO 2004/106356, Wengel et al., WO 1999/014226; Seth et al., WO 2007/134181; Seth et al., U.S. Pat. No. 7,547,684; Seth et al., U.S. Pat. No. 7,666,854; Seth et al., U.S. Pat. No. 8,088,746; Seth et al., U.S. Pat. No. 7,750,131; Seth et al., U.S. Pat. No. 8,030,467; Seth et al., U.S. Pat. No. 8,268,980; Seth et al., U.S. Pat. No. 8,546,556; Seth et al., U.S. Pat. No. 8,530,640; Migawa et al., U.S. Pat. No. 9,012,421; Seth et al., U.S. Pat. No. 8,501,805; Allerson et al., US 2008/0039618; and Migawa et al., US 2015/0191727.

[0241] In certain embodiments, bicyclic sugar moieties and nucleosides incorporating such bicyclic sugar moieties are further defined by isomeric configuration. For example, an LNA nucleoside (described herein) may be in the α-L configuration or in the β-D configuration.

[chemical structure]

[0242] α-L-methyleneoxy (4′-CH₂—O-2′) or α-L-LNA bicyclic nucleosides have been incorporated into oligonucleotides that showed antisense activity (Frieden et al., Nucleic Acids Research, 2003, 21, 6365-6372). The addition of locked nucleic acids to siRNAs has been shown to increase siRNA stability in serum, and to reduce off-target effects (Elmen, J. et al., (2005) Nucleic Acids Research 33(1):439-447; Mook, OR. et al., (2007) Mal Cane Ther 6(3):833-843; Grunweller, A. et al., (2003) Nucleic Acids Research 31(12):3185-3193). Herein, general descriptions of bicyclic nucleosides include both isomeric configurations. When the positions of specific bicyclic nucleosides (e.g., LNA or cEt) are identified in exemplified embodiments herein, they are in the β-D configuration, unless otherwise specified.

[0243] In certain embodiments, modified sugar moieties comprise one or more non-bridging sugar substituent and one or more bridging sugar substituent (e.g., 5′-substituted and 4′-2′ bridged sugars).

[0244] In certain embodiments, modified sugar moieties are sugar surrogates. In certain such embodiments, the oxygen atom of the sugar moiety is replaced, e.g., with a sulfur, carbon or nitrogen atom. In certain such embodiments, such modified sugar moieties also comprise bridging and/or non-bridging substituents as described herein. For example, certain sugar surrogates comprise a 4′-sulfur atom and a substitution at the 2′-position (see, e.g., Bhat et al., U.S. Pat. No. 7,875,733 and Bhat et al., U.S. Pat. No. 7,939,677) and/or the 5′ position.

[0245] In certain embodiments, sugar surrogates comprise rings having other than 5 atoms. For example, in certain embodiments, a sugar surrogate comprises a six-membered tetrahydropyran (“THP”). Such tetrahydropyrans may be further modified or substituted. Nucleosides comprising such modified tetrahydropyrans include, but are not limited to, hexitol nucleic acid (“HNA”), anitol nucleic acid (“ANA”), manitol nucleic acid (“MNA”) (see e.g., Leumann, C J. Bioorg. & Med. Chem. 2002, 10, 841-854), fluoro hexitol nucleic acid (F-HNA):

[chemical structure]

(“F-HNA”, see e.g., Swayze et al., U.S. Pat. No. 8,088,904; Swayze et al., U.S. Pat. No. 8,440,803; and Swayze et al., U.S. Pat. No. 9,005,906) F-HNA can also be referred to as a F-THP or 3′-fluoro tetrahydropyran, and nucleosides comprising additional modified THP compounds having the formula:

[chemical structure]

wherein, independently, for each of said modified THP nucleoside:
[0246] Bx is a nucleobase moiety;
[0247] T₃ and T₄ are each, independently, an internucleoside linking group linking the modified THP nucleoside to the remainder of an oligonucleotide or one of T₃ and T₄ is an internucleoside linking group linking the modified THP nucleoside to the remainder of an oligonucleotide and the other of T₃ and T₄ is H, a hydroxyl protecting group, a linked conjugate group, or a 5′ or 3′-terminal group; q₁, q₂, q₃, q₄, q₅, q₆ and q₇ are each, independently, H, C₁-C₆ alkyl, substituted C₁-C₆ alkyl, C₂-C₆ alkenyl, substituted C₂-C₆ alkenyl, C₂-C₆ alkynyl, or substituted C₂-C₆ alkynyl; and each of R₁ and R₂ is independently selected from among: hydrogen, halogen, substituted or unsubstituted alkoxy, NJ₁J₂, SJ₁, N₃, OC(═X)J₁, OC(═X)NJ₁J₂, NJ₃C(═X)NJ₁J₂, and CN, wherein X is O, S or NJ₁, and each J₁, J₂, and J₃ is, independently, H or C₁-C₆ alkyl.

[0248] In certain embodiments, modified THP nucleosides are provided wherein q₁, q₂, q₃, q₄, q₅, q₆ and q₇ are each H. In certain embodiments, at least one of q₁, q₂, q₃, q₄, q₅, q₆ and q₇ is other than H. In certain embodiments, at least one of q₁, q₂, q₃, q₄, q₅, q₆ and q₇ is methyl. In certain embodiments, modified THP nucleosides are provided wherein one of R₁ and R₂ is F. In certain embodiments, R₁ is F and R₂ is H, in certain embodiments, R₁ is methoxy and R₂ is H, and in certain embodiments, R₁ is methoxyethoxy and R₂ is H.

[0249] In certain embodiments, sugar surrogates comprise rings having more than 5 atoms and more than one heteroatom. For example, nucleosides comprising morpholino sugar moieties and their use in oligonucleotides have been reported (see, e.g., Braasch et al., Biochemistry, 2002, 41, 4503-4510 and Summerton et al., U.S. Pat. No. 5,698,685; Summerton et al., U.S. Pat. No. 5,166,315; Summerton et al., U.S. Pat. No. 5,185,444; and Summerton et al., U.S. Pat. No. 5,034,506). As used here, the term “morpholino” means a sugar surrogate having the following structure:

[chemical structure]

[0250] In certain embodiments, morpholinos may be modified, for example, by adding or altering various substituent groups from the above morpholino structure. Such sugar surrogates are referred to herein as “modified morpholinos.” In certain embodiments, sugar surrogates comprise acyclic moieties. Examples of nucleosides and oligonucleotides comprising such acyclic sugar surrogates include, but are not limited to: peptide nucleic acid (“PNA”), acyclic butyl nucleic acid (see, e.g., Kumar et al., Org. Biomol. Chem., 2013, 11, 5853-5865), and nucleosides and oligonucleotides described in Manoharan et al., US2013/130378. Representative U.S. patents that teach the preparation of PNA compounds include, but are not limited to, U.S. Pat. Nos. 5,539,082; 5,714,331; and 5,719,262. Additional PNA compounds suitable for use in the RNAi oligonucleotides are described in, for example, in Nielsen et al., Science, 1991, 254, 1497-1500.

[0251] In certain embodiments, sugar surrogates are the “unlocked” sugar structure of UNA (unlocked nucleic acid) nucleosides. UNA is a nucleoside wherein any of the bonds of the sugar moiety has been removed, forming an unlocked sugar surrogate. Representative U.S. publications that teach the preparation of UNA include, but are not limited to, U.S. Pat. No. 8,314,227; and US Patent Publication Nos. 2013/0096289; 2013/0011922; and 2011/0313020, the entire contents of each of which are hereby incorporated herein by reference.

[0252] In certain embodiments, sugar surrogates are the glycerol as found in GNA (glycol nucleic acid) nucleosides as depicted below:

[chemical structure]

[0253] where Bx represents any nucleobase.

[0254] Many other modified sugar moieties and sugar surrogates are known in the art that can be used in modified nucleosides.

### 2. Certain Modified Nucleobases

[0255] In certain embodiments, oligonucleotides comprise one or more nucleoside comprising a modified nucleobase. In certain embodiments, oligonucleotides comprise one or more inosine nucleosides (i.e., nucleosides comprising a hypoxantine nucleobase).

[0256] In certain embodiments, modified nucleobases are selected from: 5-substituted pyrimidines, 6-azapyrimidines, alkyl or alkynyl substituted pyrimidines, alkyl substituted purines, and N-2, N-6, and 0-6 substituted purines. In certain embodiments, modified nucleobases are selected from: 2-aminopropyladenine, 5-hydroxymethyl cytosine, 5-methylcytosine, xanthine, hypoxanthine, 2-aminoadenine, 6-N-methylguanine, 6-N-methyladenine, 2-propyladenine, 2-thiouracil, 2-thiothymine and 2-thiocytosine, 5-propynyl (C≡C—CH₃) uracil, 5-propynylcytosine, 6-azouracil, 6-azocytosine, 6-azothymine, 5-ribosyluracil (pseudouracil), 4-thiouracil, 8-halo, 8-amino, 8-thiol, 8-thioalkyl, 8-hydroxyl, 8-aza and other 8-substituted purines, 5-halo, particularly, 5-bromo, 5-trifluoromethyl, 5-halouracil, and 5-halocytosine, 7-methylguanine, 7-methyladenine, 2-F-adenine, 2-aminoadenine, 7-deazaguanine, 7-deazaadenine, 3-deazaguanine, 3-deazaadenine, 6-N-benzoyladenine, 2-N-isobutyrylguanine, 4-N-benzoylcytosine, 4-N-benzoyluracil, 5-methyl 4-N-benzoylcytosine, 5-methyl 4-N-benzoyluracil, universal bases, hydrophobic bases, promiscuous bases, size-expanded bases, and fluorinated bases. Further modified nucleobases include tricyclic pyrimidines, such as 1,3-diazaphenoxazine-2-one, 1,3-diazaphenothiazine-2-one, and 9-(2-aminoethoxy)-1,3-diazaphenoxazine-2-one (G-clamp). Modified nucleobases may also include those in which the purine or pyrimidine base is replaced with other heterocycles, for example, 7-deaza-adenine, 7-deazaguanosine, 2-aminopyridine and 2-pyridone. Further nucleobases include those disclosed in Merigan et al., U.S. Pat. No. 3,687,808, those disclosed in The Concise Encyclopedia Of Polymer Science And Engineering, Kroschwitz, J. I., Ed., John Wiley & Sons, 1990, 858-859; Englisch et al., Angewandte Chemie, International Edition, 1991, 30, 613; Sanghvi, Y. S., Chapter 15, Antisense Research and Applications, Crooke, S. T. and Lebleu, B., Eds., CRC Press, 1993, 273-288; and those disclosed in Chapters 6 and 15, Antisense Drug Technology, Crooke S. T., Ed., CRC Press, 2008, 163-166 and 442-443.

[0257] Publications that teach the preparation of certain of the above noted modified nucleobases, as well as other modified nucleobases include without limitation, Manoharan et al., US2003/0158403, Manoharan et al., US2003/0175906; Dinh et al., U.S. Pat. No. 4,845,205; Spielvogel et al., U.S. Pat. No. 5,130,302; Rogers et al., U.S. Pat. No. 5,134,066; Bischofberger et al., U.S. Pat. No. 5,175,273; Urdea et al., U.S. Pat. No. 5,367,066; Benner et al., U.S. Pat. No. 5,432,272; Matteucci et al., U.S. Pat. No. 5,434,257; Gmeiner et al., U.S. Pat. No. 5,457,187; Cook et al., U.S. Pat. No. 5,459,255; Froehler et al., U.S. Pat. No. 5,484,908; Matteucci et al., U.S. Pat. No. 5,502,177; Hawkins et al., U.S. Pat. No. 5,525,711; Haralambidis et al., U.S. Pat. No. 5,552,540; Cook et al., U.S. Pat. No. 5,587,469; Froehler et al., U.S. Pat. No. 5,594,121; Switzer et al., U.S. Pat. No. 5,596,091; Cook et al., U.S. Pat. No. 5,614,617; Froehler et al., U.S. Pat. No. 5,645,985; Cook et al., U.S. Pat. No. 5,681,941; Cook et al., U.S. Pat. No. 5,811,534; Cook et al., U.S. Pat. No. 5,750,692; Cook et al., U.S. Pat. No. 5,948,903; Cook et al., U.S. Pat. No. 5,587,470; Cook et al., U.S. Pat. No. 5,457,191; Matteucci et al., U.S. Pat. No. 5,763,588; Froehler et al., U.S. Pat. No. 5,830,653; Cook et al., U.S. Pat. No. 5,808,027; Cook et al., U.S. Pat. No. 6,166,199; and Matteucci et al., U.S. Pat. No. 6,005,096.

### 3. Certain Modified Internucleoside Linkages

[0258] The naturally occurring internucleoside linkage of RNA and DNA is a 3′ to 5′ phosphodiester linkage. In certain embodiments, nucleosides of oligonucleotides may be linked together using one or more modified internucleoside linkages. The two main classes of internucleoside linking groups are defined by the presence or absence of a phosphorus atom. Representative phosphorus-containing internucleoside linkages include but are not limited to phosphates, which contain a phosphodiester bond (“P═O”) (also referred to as unmodified or naturally occurring linkages), phosphotriesters, methylphosphonates, phosphoramidates, phosphorothioates (“P═S”), and phosphorodithioates (“HS—P═S”). Representative non-phosphorus containing internucleoside linking groups include but are not limited to methylenemethylimino (—CH₂—N(CH₃)—O—CH₂—), thiodiester, thionocarbamate (—O—C(═O)(NH)—S—); siloxane (—O—SiH₂—O—); and N,N′-dimethylhydrazine (—CH₂—N(CH₃)—N(CH₃)—). Modified internucleoside linkages, compared to naturally occurring phosphate linkages, can alter, typically increase, nuclease resistance of the oligonucleotide. In certain embodiments, internucleoside linkages having a chiral atom can be prepared as a racemic mixture, or as separate enantiomers. Methods of preparation of phosphorous-containing and non-phosphorous-containing internucleoside linkages are well known to those skilled in the art.

[0259] In certain embodiments, a modified internucleoside linkage is any of those described in WO 2021/030778, incorporated by reference herein. In certain embodiments, a modified internucleoside linkage comprises the formula:

[chemical structure]

wherein independently for each internucleoside linking group of the modified oligonucleotide:
[0260] X is selected from O or S;
[0261] R₁ is selected from H, C₁-C₆ alkyl, and substituted C₁-C₆ alkyl; and
[0262] T is selected from SO₂R₂, C(═O)R₃, and P(═O)R₄R₅, wherein:
[0263] R₂ is selected from an aryl, a substituted aryl, a heterocycle, a substituted heterocycle, an aromatic heterocycle, a substituted aromatic heterocycle, a diazole, a substituted diazole, a C₁-C₆ alkoxy, C₁-C₆ alkyl, C₁-C₆ alkenyl, C₁-C₆ alkynyl, substituted C₁-C₆ alkyl, substituted C₁-C₆ alkenyl substituted C₁-C₆ alkynyl, and a conjugate group;
[0264] R₃ is selected from an aryl, a substituted aryl, CH₃, N(CH₃)₂, OCH₃ and a conjugate group;
[0265] R₄ is selected from OCH₃, OH, C₁-C₆ alkyl, substituted C₁-C₆ alkyl and a conjugate group; and
[0266] R₅ is selected from OCH₃, OH, C₁-C₆ alkyl, and substituted C₁-C₆ alkyl.

[0267] In certain embodiments, a modified internucleoside linkage comprises a mesyl phosphoramidate linking group having a formula:

[chemical structure]

[0268] In certain embodiments, a mesyl phosphoramidate internucleoside linkage may comprise a chiral center. In certain embodiments, modified oligonucleotides comprising (Rp) and/or (Sp) mesyl phosphoramidates comprise one or more of the following formulas, respectively, wherein “B” indicates a nucleobase:

[chemical structure]

[0269] Representative internucleoside linkages having a chiral center include but are not limited to alkylphosphonates, mesyl phosphoramidates, and phosphorothioates. Modified oligonucleotides comprising internucleoside linkages having a chiral center can be prepared as populations of modified oligonucleotides comprising stereorandom internucleoside linkages, or as populations of modified oligonucleotides comprising phosphorothioate or other linkages containing chiral centers in particular stereochemical configurations. In certain embodiments, populations of modified oligonucleotides comprise phosphorothioate internucleoside linkages wherein all of the phosphorothioate internucleoside linkages are stereorandom. In certain embodiments, populations of modified oligonucleotides comprise mesyl phosphoramidate internucleoside linkages wherein all of the mesyl phosphoramidate internucleoside linkages are stereorandom. Such modified oligonucleotides can be generated using synthetic methods that result in random selection of the stereochemical configuration of each phosphorothioate or mesyl phosphoramidate linkage. Nonetheless, each individual phosphorothioate or mesyl phosphoramidate of each individual oligonucleotide molecule has a defined stereoconfiguration. In certain embodiments, populations of modified oligonucleotides are enriched for modified oligonucleotides comprising one or more particular phosphorothioate or mesyl phosphoramidate internucleoside linkages in a particular, independently selected stereochemical configuration. In certain embodiments, the particular configuration of the particular phosphorothioate or mesyl phosphoramidate linkage is present in at least 65% of the molecules in the population. In certain embodiments, the particular configuration of the particular phosphorothioate or mesyl phosphoramidate linkage is present in at least 70% of the molecules in the population. In certain embodiments, the particular configuration of the particular phosphorothioate or mesyl phosphoramidate linkage is present in at least 80% of the molecules in the population. In certain embodiments, the particular configuration of the particular phosphorothioate or mesyl phosphoramidate linkage is present in at least 90% of the molecules in the population. In certain embodiments, the particular configuration of the particular phosphorothioate or mesyl phosphoramidate linkage is present in at least 99% of the molecules in the population. Such chirally enriched populations of modified oligonucleotides can be generated using synthetic methods known in the art, e.g., methods described in Oka et al., JACS 125, 8307 (2003), Wan et al. Nuc. Acid. Res. 42, 13456 (2014), and WO 2017/015555. In certain embodiments, a population of modified oligonucleotides is enriched for modified oligonucleotides having at least one indicated phosphorothioate or mesyl phosphoramidate in the (Sp) configuration. In certain embodiments, a population of modified oligonucleotides is enriched for modified oligonucleotides having at least one phosphorothioate or mesyl phosphoramidate in the (Rp) configuration. In certain embodiments, modified oligonucleotides comprising (Rp) and/or (Sp) phosphorothioates comprise one or more of the following formulas, respectively, wherein “B” indicates a nucleobase:

[chemical structure]

[0270] Unless otherwise indicated, chiral internucleoside linkages of modified oligonucleotides described herein can be stereorandom or in a particular stereochemical configuration.

[0271] Neutral internucleoside linkages include, without limitation, phosphotriesters, methylphosphonates, MMI (3′-CH₂—N(CH₃)—O-5′), amide-3 (3′-CH₂—C(═O)—N(H)-5′), amide-4 (3′-CH₂—N(H)—C(═O)-5′), formacetal (3′-O—CH₂—O-5′), methoxypropyl, and thioformacetal (3′-S—CH₂—O-5′). Further neutral internucleoside linkages include nonionic linkages comprising siloxane (dialkylsiloxane), carboxylate ester, carboxamide, sulfide, sulfonate ester and amides (See, for example: Carbohydrate Modifications in Antisense Research; Y. S. Sanghvi and P. D. Cook, Eds., ACS Symposium Series 580; Chapters 3 and 4, 40-65). Further neutral internucleoside linkages include nonionic linkages comprising mixed N, O, S and CH₂ component parts.

[0272] In certain embodiments, oligonucleotides (such as antisense oligonucleotides and/or sense oligonucleotides) comprise one or more inverted nucleoside, as shown below:

[chemical structure]

wherein each Bx independently represents any nucleobase.

[0273] In certain embodiments, an inverted nucleoside is terminal (i.e., the last nucleoside on one end of an oligonucleotide) and so only one internucleoside linkage depicted above will be present. In certain such embodiments, additional features (such as a conjugate group) may be attached to the inverted nucleoside. Such terminal inverted nucleosides can be attached to either or both ends of an oligonucleotide.

[0274] In certain embodiments, such groups lack a nucleobase and are referred to herein as inverted sugar moieties. In certain embodiments, an inverted sugar moiety is terminal (i.e., attached to the last nucleoside on one end of an oligonucleotide) and so only one internucleoside linkage above will be present. In certain such embodiments, additional features (such as a conjugate group) may be attached to the inverted sugar moiety. Such terminal inverted sugar moieties can be attached to either or both ends of an oligonucleotide.

[0275] In certain embodiments, nucleic acids can be linked 2′ to 5′ rather than the standard 3′ to 5′ linkage. Such a linkage is illustrated below.

[chemical structure]

[0276] wherein each Bx represents any nucleobase.

### B. Antisense Oligonucleotides

[0277] In certain embodiments, antisense oligonucleotides comprise a number of linked nucleosides, wherein certain nucleosides and/or linkages are modified.

### 1. Certain Lengths

[0278] In certain embodiments, antisense oligonucleotides (including modified oligonucleotides) can have any of a variety of ranges of lengths. In certain embodiments, antisense oligonucleotides consist of X to Y linked nucleosides, where X represents the fewest number of nucleosides in the range and Y represents the largest number nucleosides in the range. In certain such embodiments, X and Y are each independently selected from 8, 9, 10, 11, 12, 13, 14, 15, 16, 17, 18, 19, 20, 21, 22, 23, 24, 25, 26, 27, 28, 29, 30, 31, 32, 33, 34, 35, 36, 37, 38, 39, 40, 41, 42, 43, 44, 45, 46, 47, 48, 49, and 50, provided that X≤Y. For example, in certain embodiments, antisense oligonucleotides consist of 12 to 20, 12 to 25, 12 to 30, 12 to 50, 13 to 20, 13 to 25, 13 to 30, 13 to 50, 14 to 20, 14 to 25, 14 to 30, 14 to 50, 15 to 20, 15 to 25, 15 to 30, 15 to 50, 16 to 18, 16 to 20, 16 to 25, 16 to 30, 16 to 50, 17 to 20, 17 to 25, 17 to 30, 17 to 50, 18 to 20, 18 to 25, 18 to 30, 18 to 50, 19 to 20, 19 to 25, 19 to 29, 19 to 30, 19 to 50, 20 to 25, 20 to 30, 20 to 50, 21 to 25, 21 to 30, 21 to 50, 22 to 25, 22 to 30, 22 to 50, 23 to 25, 23 to 30, or 23 to 50 linked nucleosides.

[0279] In certain embodiments, antisense oligonucleotides consist of 12-30 linked nucleosides. In certain embodiments, antisense oligonucleotides consist of 15-30 linked nucleosides. In certain embodiments, antisense oligonucleotides consist of 17-25 linked nucleosides. In certain embodiments, antisense oligonucleotides consist of 17-23 linked nucleosides. In certain embodiments, antisense oligonucleotides consist of 17-21 linked nucleosides. In certain embodiments, antisense oligonucleotides consist of 18-30 linked nucleosides. In certain embodiments, antisense oligonucleotides consist of 19-29 linked nucleosides. In certain embodiments, antisense oligonucleotides consist of 20-30 linked nucleosides. In certain embodiments, antisense oligonucleotides consist of 21-30 linked nucleosides. In certain embodiments, antisense oligonucleotides consist of 23-30 linked nucleosides. In certain embodiments, antisense oligonucleotides consist of 18-25 linked nucleosides. In certain embodiments, antisense oligonucleotides consist of 20-22 linked nucleosides. In certain embodiments, antisense oligonucleotides consist of 21-23 linked nucleosides. In certain embodiments, antisense oligonucleotides consist of 23-24 linked nucleosides. In certain embodiments, antisense oligonucleotides consist of 20 linked nucleosides. In certain embodiments, antisense oligonucleotides consist of 21 linked nucleosides. In certain embodiments, antisense oligonucleotides consist of 22 linked nucleosides. In certain embodiments, antisense oligonucleotides consist of 23 linked nucleosides.

### 2. Certain Sugar Motifs

[0280] In certain embodiments, the sugar moiety of at least one nucleoside of an antisense oligonucleotide is a modified sugar moiety.

[0281] In certain such embodiments, at least one nucleoside comprises a 2′-OMe modified sugar moiety. In certain embodiments, at least 2 nucleosides comprise 2′-OMe modified sugar moieties. In certain embodiments, at least 5 nucleosides comprise 2′-OMe modified sugar moieties. In certain embodiments, at least 8 nucleosides comprise 2′-OMe modified sugar moieties. In certain embodiments, at least 10 nucleosides comprise 2′-OMe modified sugar moieties. In certain embodiments, at least 12 nucleosides comprise 2′-OMe modified sugar moieties. In certain embodiments, at least 14 nucleosides comprise 2′-OMe modified sugar moieties. In certain embodiments, at least 15 nucleosides comprise 2′-OMe modified sugar moieties. In certain embodiments, at least 17 nucleosides comprise 2′-OMe modified sugar moieties. In certain such embodiments, at least 18 nucleosides comprise 2′-OMe modified sugar moieties. In certain such embodiments, at least 20 nucleosides comprise 2′-OMe modified sugar moieties. In certain such embodiments, at least 21 nucleosides comprise 2′-OMe modified sugar moieties.

[0282] In certain embodiments, at least one nucleoside comprises a 2′-F modified sugar. In certain embodiments, at least 2 nucleosides comprise 2′-F modified sugar moieties. In certain embodiments, at least 3 nucleosides comprise 2′-F modified sugar moieties. In certain embodiments, at least 4 nucleosides comprise 2′-F modified sugar moieties. In certain embodiments, one, but not more than one nucleoside comprises a 2′-F modified sugar. In certain embodiments, 1 or 2 nucleosides comprise 2′-F modified sugar moieties. In certain embodiments, 1-3 nucleosides comprise 2′-F modified sugar moieties. In certain embodiments, at least 1-4 nucleosides comprise 2′-F modified sugar moieties. In certain embodiments, antisense oligonucleotides have a block of 2-4 contiguous 2′-F modified nucleosides. In certain embodiments, 4 nucleosides of an antisense oligonucleotide are 2′-F modified nucleosides and 3 of those 2′-F modified nucleosides are contiguous. In certain such embodiments the remainder of the nucleosides are 2′-OMe modified. In certain embodiments, antisense oligonucleotides have a sugar motif of (5′ to 3′): yfyfyfyfyfyfyfyfyfyfyyy or yfyyyfyyyyyyyfyfyyyyyyy, wherein each “y” represents a 2′-OMe sugar moiety and each “f” represents a 2′-fluororibosyl sugar.

[0283] In certain embodiments, one nucleoside of an antisense oligonucleotide is a UNA.

[0284] In certain embodiments, one nucleoside of an antisense oligonucleotide is a GNA.

[0285] In certain embodiments, 1-4 nucleosides of an antisense oligonucleotide is/are DNA. In certain such embodiments, the 1-4 DNA nucleosides are at one or both ends of the antisense oligonucleotide.

### 3. Certain Internucleoside Linkage Motifs

[0286] In certain embodiments, at least one linkage of the antisense oligonucleotide is a modified linkage. In certain embodiments, the 5′-most linkage (i.e., linking the first nucleoside from the 5′-end to the second nucleoside from the 5′-end) is modified. In certain embodiments, the two 5′-most linkages are modified. In certain embodiments, the first one or 2 linkages from the 3′-end are modified. In certain such embodiments, the modified linkage is a phosphorothioate linkage. In certain embodiments, the remaining linkages are all unmodified phosphodiester linkages. In certain embodiments the internucleoside linkage motif is ssooooooooooooooooooss, wherein each “s” represents a phosphorothioate linkage and each “o” represents a phosphodiester linkage.

[0287] In certain embodiments, at least one linkage of the antisense oligonucleotide is an inverted linkage.

### C. Sense Oligonucleotides

[0288] In certain embodiments, sense oligonucleotides comprise a number of linked nucleosides, wherein certain nucleosides and/or linkages are modified.

### 1. Certain Lengths

[0289] In certain embodiments, sense oligonucleotides (including modified oligonucleotides) can have any of a variety of ranges of lengths. In certain embodiments, sense oligonucleotides consist of X to Y linked nucleosides, where X represents the fewest number of nucleosides in the range and Y represents the largest number nucleosides in the range. In certain such embodiments, X and Y are each independently selected from 8, 9, 10, 11, 12, 13, 14, 15, 16, 17, 18, 19, 20, 21, 22, 23, 24, 25, 26, 27, 28, 29, 30, 31, 32, 33, 34, 35, 36, 37, 38, 39, 40, 41, 42, 43, 44, 45, 46, 47, 48, 49, and 50; provided that X≤Y. For example, in certain embodiments, sense oligonucleotides consist of 10 to 25, 10 to 30, 10 to 50, 12 to 20, 12 to 25, 12 to 30, 12 to 50, 13 to 20, 13 to 25, 13 to 30, 13 to 50, 14 to 20, 14 to 25, 14 to 30, 14 to 50, 15 to 20, 15 to 25, 15 to 30, 15 to 50, 16 to 18, 16 to 20, 16 to 25, 16 to 30, 16 to 50, 17 to 20, 17 to 25, 17 to 30, 17 to 50, 18 to 20, 18 to 25, 18 to 30, 18 to 50, 19 to 20, 19 to 25, 19 to 30, 19 to 50, 20 to 25, 20 to 30, 20 to 50, 21 to 25, 21 to 30, 21 to 50, 22 to 25, 22 to 30, 22 to 50, 23 to 25, 23 to 30, or 23 to 50 linked nucleosides.

[0290] In certain embodiments, sense oligonucleotides consist of 12-30 linked nucleosides. In certain embodiments, sense oligonucleotides consist of 15-29 linked nucleosides. In certain embodiments, sense oligonucleotides consist of 17-25 linked nucleosides. In certain embodiments, sense oligonucleotides consist of 17-23 linked nucleosides. In certain embodiments, sense oligonucleotides consist of 17-21 linked nucleosides. In certain embodiments, sense oligonucleotides consist of 18-30 linked nucleosides. In certain embodiments, sense oligonucleotides consist of 20-30 linked nucleosides. In certain embodiments, sense oligonucleotides consist of 21-30 linked nucleosides. In certain embodiments, sense oligonucleotides consist of 23-30 linked nucleosides. In certain embodiments, sense oligonucleotides consist of 18-25 linked nucleosides. In certain embodiments, sense oligonucleotides consist of 20-22 linked nucleosides. In certain embodiments, sense oligonucleotides consist of 21-23 linked nucleosides. In certain embodiments, sense oligonucleotides consist of 23-24 linked nucleosides. In certain embodiments, sense oligonucleotides consist of 20 linked nucleosides. In certain embodiments, sense oligonucleotides consist of 21 linked nucleosides. In certain embodiments, sense oligonucleotides consist of 22 linked nucleosides. In certain embodiments, sense oligonucleotides consist of 23 linked nucleosides. In certain embodiments, sense oligonucleotides consist of 25 linked nucleosides.

### 2. Certain Sugar Motifs

[0291] In certain embodiments, the sugar moiety of at least one nucleoside of a sense oligonucleotides is a modified sugar moiety.

[0292] In certain such embodiments, at least one nucleoside comprises a 2′-OMe modified sugar moiety. In certain embodiments, at least 2 nucleosides comprise 2′-OMe modified sugar moieties. In certain embodiments, at least 5 nucleosides comprise 2′-OMe modified sugar moieties. In certain embodiments, at least 8 nucleosides comprise 2′-OMe modified sugar moieties. In certain embodiments, at least 10 nucleosides comprise 2′-OMe modified sugar moieties. In certain embodiments, at least 12 nucleosides comprise 2′-OMe modified sugar moieties. In certain embodiments, at least 14 nucleosides comprise 2′-OMe modified sugar moieties. In certain embodiments, at least 15 nucleosides comprise 2′-OMe modified sugar moieties. In certain embodiments, at least 17 nucleosides comprise 2′-OMe modified sugar moieties. In certain such embodiments, at least 18 nucleosides comprise 2′-OMe modified sugar moieties. In certain such embodiments, at least 20 nucleosides comprise 2′-OMe modified sugar moieties. In certain such embodiments, at least 21 nucleosides comprise 2′-OMe modified sugar moieties.

[0293] In certain embodiments, at least one nucleoside comprises a 2′-F modified sugar moiety. In certain embodiments, at least 2 nucleosides comprise 2′-F modified sugar moieties. In certain embodiments, at least 3 nucleosides comprise 2′-F modified sugar moieties. In certain embodiments, at least 4 nucleosides comprise 2′-F modified sugar moieties. In certain embodiments, one, but not more than nucleoside comprises a 2′-F modified sugar moiety. In certain embodiments, 1 or 2 nucleosides comprise 2′-F modified sugar moieties. In certain embodiments, 1-3 nucleosides comprise 2′-F modified sugar moieties. In certain embodiments, at least 1-4 nucleosides comprise 2′-F modified sugar moieties. In certain embodiments, sense oligonucleotides have a block of 2-4 contiguous 2′-F modified nucleosides. In certain embodiments, 4 nucleosides of an sense oligonucleotide are 2′-F modified nucleosides and 3 of those 2′-F modified nucleosides are contiguous. In certain such embodiments the remainder of the nucleosides are 2′OMe modified. In certain embodiments, sense oligonucleotides have a sugar motif of (5′ to 3′): fyfyfyfyfyfyfyfyfyfyf or yyyyyyfyfffyyyyyyyyyy, wherein each “y” represents a 2′-OMe sugar moiety and each “f” represents a 2′-fluororibosyl sugar.

[0294] In certain embodiments, one nucleoside of an sense oligonucleotide is a UNA.

[0295] In certain embodiments, one nucleoside of an sense oligonucleotide is a GNA.

[0296] In certain embodiments, 1-4 nucleosides of an sense oligonucleotide is/are DNA. In certain such embodiments, the 1-4 DNA nucleosides are at one or both ends of the sense oligonucleotide.

### 3. Certain Internucleoside Linkages

[0297] In certain embodiments, at least one linkage of the sense oligonucleotides is a modified linkage. In certain embodiments, the 5′-most linkage (i.e., linking the first nucleoside from the 5′-end to the second nucleoside from the 5′-end) is modified. In certain embodiments, the two 5′-most linkages are modified. In certain embodiments, the first one or 2 linkages from the 3′-end are modified. In certain such embodiments, the modified linkage is a phosphorothioate linkage. In certain embodiments, the remaining linkages are all unmodified phosphodiester linkages. In certain embodiments the internucleoside linkage motif is ssooooooooooooooooss, wherein each “s” represents a phosphorothioate linkage and each “o” represents a phosphodiester linkage.

[0298] In certain embodiments, at least one linkage of the sense oligonucleotides is an inverted linkage.

### II. Oligomeric Duplexes

[0299] In certain embodiments, an oligomeric compound described herein comprising an oligonucleotide, having a nucleobase sequence complementary to that of a target nucleic acid, is paired with a second oligomeric compound to form an oligomeric duplex. Such oligomeric duplexes comprise a first oligomeric compound having a portion complementary to a target nucleic acid and a second oligomeric compound having a portion complementary to the first oligomeric compound. In certain embodiments, the first oligomeric compound of an oligomeric duplex comprises or consists of (1) a first modified or unmodified oligonucleotide and optionally a conjugate group and (2) a second modified or unmodified oligonucleotide and optionally a conjugate group. Either or both oligomeric compounds of an oligomeric duplex may comprise a conjugate group. The oligonucleotides of each oligomeric compound of an oligomeric duplex may include non-complementary overhanging nucleosides. In certain embodiments, the two oligonucleotides have at least one mismatch relative to one another. In certain embodiments, the oligomeric duplex is an antisense agent.

[0300] In certain embodiments, an oligomeric duplex comprises:
[0301] a first oligomeric compound comprising a first modified oligonucleotide consisting of 15 to 30 linked nucleosides wherein the nucleobase sequence of the first modified oligonucleotide comprises at least 8, at least 9, at least 10, at least 11, at least 12, at least 13, at least 14, at least 15, at least 16, at least 17, at least 18, at least 19, at least 20, at least 21, at least 22, or 23 contiguous nucleobases of the nucleobase sequence of any of SEQ ID NOs: 11-39, 69-112, 157-204, 253-290, 329-375, 423-452, 483-516, 551-580, 611-650, 691-721, 753-898, 1045-1443; and
[0302] a second oligomeric compound comprising a second modified oligonucleotide consisting of 15 to 29 linked nucleosides wherein the nucleobase sequence of the second modified oligonucleotide comprises a complementary region of at least 12 nucleobases that is at least 90% complementary to an equal length portion of the first modified oligonucleotide.

[0303] In certain embodiments, the first oligomeric compound is an antisense compound. In certain embodiments, the first modified oligonucleotide is an antisense oligonucleotide. In certain embodiments, the second oligomeric compound is a sense compound. In certain embodiments, the second modified oligonucleotide is a sense oligonucleotide. In certain embodiments, the first modified oligonucleotide is an antisense RNAi oligonucleotide. In certain embodiments, the second oligomeric compound is a sense compound. In certain embodiments, the second modified oligonucleotide is a sense RNAi oligonucleotide. In certain embodiments, the nucleobase sequence of the second modified oligonucleotide comprises a complementary region of at least 9, at least 10, at least 11, at least 12, at least 13, at least 14, at least 15, at least 16, at least 17, at least 18, at least 19, at least 20, or 21 nucleobases that is at least 90% complementary to the nucleobase sequence of an equal portion of the first modified oligonucleotide. In certain embodiments, the nucleobase sequence of the second modified oligonucleotide comprises a complementary region of at least 8, at least 9, at least 10, at least 11, at least 12, at least 13, at least 14, at least 15, at least 16, at least 17, at least 18, at least 19, at least 20, or 21 nucleobases that is at least 95% complementary to the nucleobase sequence of an equal portion of the first modified oligonucleotide. In certain embodiments, the nucleobase sequence of the second modified oligonucleotide comprises a complementary region of at least 8, at least 9, at least 10, at least 11, at least 12, at least 13, at least 14, at least 15, at least 16, at least 17, at least 18, at least 19, at least 20, or 21 nucleobases that is 100% complementary to the nucleobase sequence of an equal portion of the first modified oligonucleotide.

[0304] In certain embodiments, an oligomeric duplex comprises:
[0305] a first oligomeric compound comprising a first modified oligonucleotide consisting of 15 to 30 linked nucleosides wherein the nucleobase sequence of the first modified oligonucleotide comprises at least 8, at least 9, at least 10, at least 11, at least 12, at least 13, at least 14, at least 15, at least 16, at least 17, at least 18, at least 19, at least 20, at least 21, at least 22, or 23 contiguous nucleobases of the nucleobase sequence of any of SEQ ID NOs: 11-39, 69-112, 157-204, 253-290, 329-375, 423-452, 483-516, 551-580, 611-650, 691-721, 753-898, 1045-1443; and
[0306] a second oligomeric compound comprising a second modified oligonucleotide consisting of 15 to 29 linked nucleosides wherein the nucleobase sequence of the second modified oligonucleotide comprises at least 8, at least 9, at least 10, at least 11, at least 12, at least 13, at least 14, at least 15, at least 16, at least 17, at least 18, at least 19, at least 20, or at least 21 contiguous nucleobases of the nucleobase sequence of any of SEQ ID NOs: 40-68, 113-156, 205-252, 291-328, 376-422, 453-482, 517-550, 581-610, 651-690, 722-752, 899-1044, 1444-1842, wherein the nucleobase sequence of the second modified oligonucleotide is at least 90% complementary to an equal length portion of the first modified oligonucleotide.

[0307] In certain embodiments, the first oligomeric compound is an antisense compound. In certain embodiments, the first modified oligonucleotide is an antisense oligonucleotide. In certain embodiments, the second oligomeric compound is a sense compound. In certain embodiments, the second modified oligonucleotide is a sense oligonucleotide. In certain embodiments, the first modified oligonucleotide is an antisense RNAi oligonucleotide. In certain embodiments, the second oligomeric compound is a sense compound. In certain embodiments, the second modified oligonucleotide is a sense RNAi oligonucleotide. In certain embodiments, the nucleobase sequence of the second modified oligonucleotide is at least 95% or 100% complementary to the nucleobase sequence of an equal length portion of the first modified oligonucleotide. In certain embodiments, the oligomeric duplex is an antisense agent.

[0308] In certain embodiments, an oligomeric duplex comprises:
[0309] a first oligomeric compound comprising a first modified oligonucleotide consisting of 23 linked nucleosides, wherein the nucleobase sequence of the first modified oligonucleotide consists of the nucleobase sequence of any of SEQ ID NOs: 11-39, 69-112, 157-204, 253-290, 329-375, 423-452, 483-516, 551-580, 611-650, 691-721, 753-898, 1045-1443; and
[0310] a second oligomeric compound comprising a second modified oligonucleotide consisting of 21 linked nucleosides, wherein the nucleobase sequence of the second modified oligonucleotide consists of the nucleobase sequence of any of SEQ ID NOs: 40-68, 113-156, 205-252, 291-328, 376-422, 453-482, 517-550, 581-610, 651-690, 722-752, 899-1044, 1444-1842, wherein the nucleobase sequence of the second modified oligonucleotide is at least 90% complementary to an equal length portion of the first modified oligonucleotide.

[0311] In certain embodiments, the first oligomeric compound is an antisense compound. In certain embodiments, the first modified oligonucleotide is an antisense oligonucleotide. In certain embodiments, the second oligomeric compound is a sense compound. In certain embodiments, the second modified oligonucleotide is a sense oligonucleotide. In certain embodiments, the first modified oligonucleotide is an antisense RNAi oligonucleotide. In certain embodiments, the second oligomeric compound is a sense compound. In certain embodiments, the second modified oligonucleotide is a sense RNAi oligonucleotide. In certain embodiments, the nucleobase sequence of the second modified oligonucleotide is at least 95% or 100% complementary to the nucleobase sequence of an equal length portion of the first modified oligonucleotide. In certain embodiments, the oligomeric duplex is an antisense agent.

[0312] In certain embodiments, an oligomeric duplex comprises a first oligomeric compound comprising a first modified oligonucleotide consisting of 15 to 30 linked nucleosides and a second oligomeric compound comprising a second modified oligonucleotide consisting of 15 to 29 linked nucleosides, wherein the nucleobase sequence of the first modified oligonucleotide and the nucleobase sequence of the second modified oligonucleotide each comprises at least 8, at least 9, at least 10, at least 11, at least 12, at least 13, at least 14, at least 15, at least 16, at least 17, at least 18, at least 19, at least 20, at least 21, at least 22, or at least 23 contiguous nucleobases of any of the following pairs of nucleobase sequences recited in SEQ ID NOs: 11/40, 12/41, 13/42, 14/43, 15/44, 16/45, 17/46, 18/47, 19/48, 20/49, 21/50, 22/51, 23/52, 24/53, 25/54, 26/55, 27/56, 28/57, 29/58, 30/59, 31/60, 32/61, 33/62, 34/63, 35/64, 36/65, 37/66, 38/67, 39/68, 69/113, 70/114, 71/115, 72/116, 73/117, 74/118, 75/119, 76/120, 77/121, 78/122, 79/123, 80/124, 81/125, 82/126, 83/127, 84/128, 85/129, 86/130, 87/131, 88/132, 89/133, 90/134, 91/135, 92/136, 93/137, 94/138, 95/139, 96/140, 97/141, 98/142, 99/143, 100/144, 101/145, 102/146, 103/147, 104/148, 105/149, 106/150, 107/151, 108/152, 109/153, 110/154, 111/155, 112/156, 157/205, 158/206, 159/207, 160/208, 161/209, 162/210, 163/211, 164/212, 165/213, 166/214, 167/215, 168/216, 169/217, 170/218, 171/219, 172/220, 173/221, 174/222, 175/223, 176/224, 177/225, 178/226, 179/227, 180/228, 181/229, 182/230, 183/231, 184/232, 185/233, 186/234, 187/235, 188/236, 189/237, 190/238, 191/239, 192/240, 193/241, 194/242, 195/243, 196/244, 197/245, 198/246, 199/247, 200/248, 201/249, 202/250, 203/251, 204/252, 253/291, 254/292, 255/293, 256/294, 257/295, 258/296, 259/297, 260/298, 261/299, 262/300, 263/301, 264/302, 265/303, 266/304, 267/305, 268/306, 269/307, 270/308, 271/309, 272/310, 273/311, 274/312, 275/313, 276/314, 277/315, 278/316, 279/317, 280/318, 281/319, 282/320, 283/321, 284/322, 285/323, 286/324, 287/325, 288/326, 289/327, 290/328, 329/376, 330/377, 331/378, 332/379, 333/380, 334/381, 335/382, 336/383, 337/384, 338/385, 339/386, 340/387, 341/388, 342/389, 343/390, 344/391, 345/392, 346/393, 347/394, 348/395, 349/396, 350/397, 351/398, 352/399, 353/400, 354/401, 355/402, 356/403, 357/404, 358/405, 359/406, 360/407, 361/408, 362/409, 363/410, 364/411, 365/412, 366/413, 367/414, 368/415, 369/416, 370/417, 371/418, 372/419, 373/420, 374/421, 375/422, 423/453, 424/454, 425/455, 426/456, 427/457, 428/458, 429/459, 430/460, 431/461, 432/462, 433/463, 434/464, 435/465, 436/466, 437/467, 438/468, 439/469, 440/470, 441/471, 442/472, 443/473, 444/474, 445/475, 446/476, 447/477, 448/478, 449/479, 450/480, 451/481, 452/482, 483/517, 484/518, 485/519, 486/520, 487/521, 488/522, 489/523, 490/524, 491/525, 492/526, 493/527, 494/528, 495/529, 496/530, 497/531, 498/532, 499/533, 500/534, 501/535, 502/536, 503/537, 504/538, 505/539, 506/540, 507/541, 508/542, 509/543, 510/544, 511/545, 512/546, 513/547, 514/548, 515/549, 516/550, 551/581, 552/582, 553/583, 554/584, 555/585, 556/586, 557/587, 558/588, 559/589, 560/590, 561/591, 562/592, 563/593, 564/594, 565/595, 566/596, 567/597, 568/598, 569/599, 570/600, 571/601, 572/602, 573/603, 574/604, 575/605, 576/606, 577/607, 578/608, 579/609, 580/610, 611/651, 612/652, 613/653, 614/654, 615/655, 616/656, 617/657, 618/658, 619/659, 620/660, 621/661, 622/662, 623/663, 624/664, 625/665, 626/666, 627/667, 628/668, 629/669, 630/670, 631/671, 632/672, 633/673, 634/674, 635/675, 636/676, 637/677, 638/678, 639/679, 640/680, 641/681, 642/682, 643/683, 644/684, 645/685, 646/686, 647/687, 648/688, 649/689, 650/690, 691/722, 692/723, 693/724, 694/725, 695/726, 696/727, 697/728, 698/729, 699/730, 700/731, 701/732, 702/733, 703/734, 704/735, 705/736, 706/737, 707/738, 708/739, 709/740, 710/741, 711/742, 712/743, 713/744, 714/745, 715/746, 716/747, 717/748, 718/749, 719/750, 720/751, 721/752, 753/899, 754/900, 755/901, 756/902, 757/903, 758/904, 759/905, 760/906, 761/907, 762/908, 763/909, 764/910, 765/911, 766/912, 767/913, 768/914, 769/915, 770/916, 771/917, 772/918, 773/919, 774/920, 775/921, 776/922, 777/923, 778/924, 779/925, 780/926, 781/927, 782/928, 783/929, 784/930, 785/931, 786/932, 787/933, 788/934, 789/935, 790/936, 791/937, 792/938, 793/939, 794/940, 795/941, 796/942, 797/943, 798/944, 799/945, 800/946, 901/947, 802/948, 803/949, 804/950, 805/951, 806/952, 807/953, 808/854, 809/955, 810/956, 811/957, 812/958, 813/959, 814/960, 815/961, 816/962, 817/963, 818/964, 819/965, 820/966, 821/967, 822/968, 823/969, 824/970, 825/971, 826/972, 827/973, 828/974, 829/975, 830/976, 831/977, 832/978, 833/979, 834/980, 835/981, 836/982, 837/983, 838/984, 839/985, 840/986, 841/987, 842/988, 843/989, 844/990, 845/991, 846/992, 847/993, 848/994, 849/995, 850/996, 851/997, 852/998, 853/999, 854/1000, 855/1001, 856/1002, 857/1003, 858/1004, 859/1005, 860/1006, 861/1007, 862/1008, 863/1009, 864/1010, 865/1011, 866/1012, 867/1013, 868/1014, 869/1015, 870/1016, 871/1017, 872/1018, 873/1019, 874/1020, 875/1021, 876/1022, 877/1023, 878/1024, 879/1025, 880/1026, 881/1027, 882/1028, 883/1029, 884/1030, 885/1031, 886/1032, 887/1033, 888/1034, 889/1035, 890/1036, 891/1037, 892/1038, 893/1039, 894/1040, 895/1041, 896/1042, 897/1043, 898/1044, 1045/1444, 1046/1445, 1047/1446, 1048/1447, 1049/1448, 1050/1449, 1051/1450, 1052/1451, 1053/1452, 1054/1453, 1055/1454, 1056/1455, 1057/1456, 1058/1457, 1059/1458, 1060/1459, 1061/1460, 1062/1461, 1063/1462, 1064/1463, 1065/1464, 1066/1465, 1067/1466, 1068/1467, 1069/1468, 1070/1469, 1071/1470, 1072/1471, 1073/1472, 1074/1473, 1075/1474, 1076/1475, 1077/1476, 1078/1477, 1079/1478, 1080/1479, 1081/1480, 1082/1481, 1083/1482, 1084/1483, 1085/1484, 1086/1485, 1087/1486, 1088/1487, 1089/1488, 1090/1489, 1091/1490, 1092/1491, 1093/1492, 1094/1493, 1095/1494, 1096/1495, 1097/1496, 1098/1497, 1099/1498, 1100/1499, 1101/1500, 1102/1501, 1103/1502, 1104/1503, 1105/1504, 1106/1505, 1107/1506, 1108/1507, 1109/1508, 1110/1509, 1111/1510, 1112/1511, 1113/1512, 1114/1513, 1115/1514, 1116/1515, 1117/1516, 1118/1517, 1119/1518, 1120/1519, 1121/1520, 1122/1521, 1123/1522, 1124/1523, 1125/1524, 1126/1525, 1127/1526, 1128/1527, 1129/1528, 1130/1529, 1131/1530, 1132/1531, 1133/1532, 1134, 1533, 1135/1534, 1136/1535, 1137/1536, 1138/1537, 1139/1538, 1140/1539, 1141/1540, 1142/1541, 1143/1542, 1144/1543, 1145/1544, 1146/1545, 1147/1546, 1148/1547, 1149/1548, 1150/1549, 1151/1550, 1152/1551, 1153/1552, 1154/1553, 1155/1554, 1156/1555, 1157/1556, 1158/1557, 1159/1558, 1160/1559, 1161/1560, 1162/1561, 1163/1562, 1164/1563, 1165/1564, 1166/1565, 1167/1566, 1168/1567, 1169/1568, 1170/1569, 1171/1570, 1172/1571, 1173/1572, 1174/1573, 1175/1574, 1176/1575, 1177/1576, 1178/1577, 1179/1578, 1180/1579, 1181/1580, 1182/1581, 1183/1582, 1184/1583, 1185/1584, 1186/1585, 1187/1586, 1188/1587, 1189/1588, 1190/1589, 1191/1590, 1192/1591, 1193/1592, 1194/1593, 1195/1594, 1196/1595, 1197/1596, 1198/1597, 1199/1598, 1200/1599, 1201/1600, 1202/1601, 1203/1602, 1204/1603, 1205/1604, 1206/1605, 1207/1608, 1208/1607, 1209/1608, 1210/1609, 1211/1610, 1212/1611, 1213/1612, 1214/1613, 1215/1614, 1216/1615, 1217/1616, 1218/1617, 1219/1618, 1220/1619, 1221/1620, 1222/1621, 1223/1622, 1224/1623, 1225/1624, 1226/1625, 1227/1626, 1228/1627, 1229/1628, 1230/1629, 1231/1630, 1232/1631, 1233/1632, 1234/1633, 1235/1634, 1236/1635, 1237/1636, 1238/1637, 1239/1638, 1240/1639, 1241/1340, 1242/1641, 1243/1642, 1244/1643, 1245/1644, 1246/1645, 1247/1646, 1248/1647, 1249/1648, 1250/1649, 1251/1650, 1252/1651, 1253/1652, 1254/1653, 1255/1654, 1256/1655, 1257/1656, 1258/1657, 1259/1658, 1260/1659, 1261/1660, 1262/1661, 1263/1662, 1264/1663, 1265/1664, 1266/1665, 1267/1666, 1268/1667, 1269/1668, 1270/1669, 1271/1670, 1272/1671, 1273/1672, 1274/1673, 1275/1674, 1276/1675, 1277/1676, 1278/1677, 1279/1678, 1280/1679, 1281/1680, 1282/1681, 1283/1682, 1284/1683, 1285/1684, 1286/1685, 1287/1686, 1288/1687, 1289/1688, 1290/1689, 1291/1690, 1292/1691, 1293/1692, 1294/1693, 1295/1694, 1296/1695, 1297/1696, 1298/1697, 1299/1698, 1300/1699, 1301/1700, 1302/1701, 1303/1702, 1304/1703, 1305/1704, 1306/1705, 1307/1706, 1308/1707, 1309/1708, 1310/1709, 1311/1710, 1312/1711, 1313/1712, 1314/1713, 1315/1714, 1316/1715, 1317/1716, 1318/1717, 1319/1718, 1320/1719, 1321/1720, 1322/1721, 1323/1722, 1324/1723, 1325/1724, 1326/1725, 1327/1726, 1328/1727, 1329/1728, 1330/1729, 1331/1730, 1332/1731, 1333/1732, 1334/1733, 1335/1734, 1336/1735, 1337/1736, 1338/1737, 1339/1738, 1340/1739, 1341/1740, 1342/1741, 1343/1742, 1344/1743, 1345/1744, 1346/1745, 1347/1746, 1348/1747, 1349/1748, 1350/1749, 1351/1750, 1352/1751, 1353/1752, 1354/1753, 1355/1754, 1356/1755, 1357/1756, 1358/1757, 1359/1758, 1360/1759, 1361/1760, 1362/1761, 1363/1762, 1364/1763, 1365/1764, 1366/1765, 1367/1766, 1368/1767, 1369/1768, 1370/1769, 1371/1770, 1372/1771, 1373/1772, 1374/1773, 1375/1774, 1376/1775, 1377/1776, 1378/1777, 1379/1778, 1380/1779, 1381/1780, 1382/1781, 1383/1782, 1384/1783, 1385/1784, 1386/1785, 1387/1786, 1388/1787, 1389/1788, 1390/1789, 1391/1790, 1392/1791, 1393/1792, 1394/1793, 1395/1794, 1396/1795, 1397/1796, 1398/1797, 1399/1798, 1400/1799, 1401/1800, 1402/1801, 1403/1802, 1404/1803, 1405/1804, 1406/1805, 1407/1806, 1408/1807, 1409/1808, 1410/1809, 1411/1810, 1412/1811, 1413/1812, 1414/1813, 1415/1814, 1416/1815, 1417/1816, 1418/1817, 1419/1818, 1420/1819, 1421/1820, 1422/1821, 1423/1822, 1424/1823, 1425/1824, 1426/1825, 1427/1826, 1428/1827, 1429/1828, 1430/1829, 1431/1830, 1432/1831, 1433/1832, 1434/1833, 1435/1834, 1436/1835, 1437/1836, 1438/1837, 1439/1838, 1440/1839, 1441/1840, 1442/1841, 1443/1842, wherein the nucleobase sequence of the first modified oligonucleotide comprises the nucleobase sequence of the first SEQ ID NO recited in the pair and the nucleobase sequence of the second modified oligonucleotide comprises the nucleobase sequence of the second SEQ ID NO recited in the pair.

[0313] In certain embodiments, the first oligomeric compound is an antisense compound. In certain embodiments, the first modified oligonucleotide is an antisense oligonucleotide. In certain embodiments, the second oligomeric compound is a sense compound. In certain embodiments, the second modified oligonucleotide is a sense oligonucleotide. In certain embodiments, the first modified oligonucleotide is an antisense RNAi oligonucleotide. In certain embodiments, the second oligomeric compound is a sense compound. In certain embodiments, the second modified oligonucleotide is a sense RNAi oligonucleotide.

[0314] In certain embodiments, an oligomeric duplex comprises a first oligomeric compound comprising a first modified oligonucleotide consisting of 15 to 30 linked nucleosides and a second oligomeric compound comprising a second modified oligonucleotide consisting of 15 to 29 linked nucleosides, wherein the nucleobase sequences of the first modified oligonucleotide and second modified oligonucleotide comprise any of the following pairs of nucleobase sequences recited in SEQ ID NOs: 11/40, 12/41, 13/42, 14/43, 15/44, 16/45, 17/46, 18/47, 19/48, 20/49, 21/50, 22/51, 23/52, 24/53, 25/54, 26/55, 27/56, 28/57, 29/58, 30/59, 31/60, 32/61, 33/62, 34/63, 35/64, 36/65, 37/66, 38/67, 39/68, 69/113, 70/114, 71/115, 72/116, 73/117, 74/118, 75/119, 76/120, 77/121, 78/122, 79/123, 80/124, 81/125, 82/126, 83/127, 84/128, 85/129, 86/130, 87/131, 88/132, 89/133, 90/134, 91/135, 92/136, 93/137, 94/138, 95/139, 96/140, 97/141, 98/142, 99/143, 100/144, 101/145, 102/146, 103/147, 104/148, 105/149, 106/150, 107/151, 108/152, 109/153, 110/154, 111/155, 112/156, 157/205, 158/206, 159/207, 160/208, 161/209, 162/210, 163/211, 164/212, 165/213, 166/214, 167/215, 168/216, 169/217, 170/218, 171/219, 172/220, 173/221, 174/222, 175/223, 176/224, 177/225, 178/226, 179/227, 180/228, 181/229, 182/230, 183/231, 184/232, 185/233, 186/234, 187/235, 188/236, 189/237, 190/238, 191/239, 192/240, 193/241, 194/242, 195/243, 196/244, 197/245, 198/246, 199/247, 200/248, 201/249, 202/250, 203/251, 204/252, 253/291, 254/292, 255/293, 256/294, 257/295, 258/296, 259/297, 260/298, 261/299, 262/300, 263/301, 264/302, 265/303, 266/304, 267/305, 268/306, 269/307, 270/308, 271/309, 272/310, 273/311, 274/312, 275/313, 276/314, 277/315, 278/316, 279/317, 280/318, 281/319, 282/320, 283/321, 284/322, 285/323, 286/324, 287/325, 288/326, 289/327, 290/328, 329/376, 330/377, 331/378, 332/379, 333/380, 334/381, 335/382, 336/383, 337/384, 338/385, 339/386, 340/387, 341/388, 342/389, 343/390, 344/391, 345/392, 346/393, 347/394, 348/395, 349/396, 350/397, 351/398, 352/399, 353/400, 354/401, 355/402, 356/403, 357/404, 358/405, 359/406, 360/407, 361/408, 362/409, 363/410, 364/411, 365/412, 366/413, 367/414, 368/415, 369/416, 370/417, 371/418, 372/419, 373/420, 374/421, 375/422, 423/453, 424/454, 425/455, 426/456, 427/457, 428/458, 429/459, 430/460, 431/461, 432/462, 433/463, 434/464, 435/465, 436/466, 437/467, 438/468, 439/469, 440/470, 441/471, 442/472, 443/473, 444/474, 445/475, 446/476, 447/477, 448/478, 449/479, 450/480, 451/481, 452/482, 483/517, 484/518, 485/519, 486/520, 487/521, 488/522, 489/523, 490/524, 491/525, 492/526, 493/527, 494/528, 495/529, 496/530, 497/531, 498/532, 499/533, 500/534, 501/535, 502/536, 503/537, 504/538, 505/539, 506/540, 507/541, 508/542, 509/543, 510/544, 511/545, 512/546, 513/547, 514/548, 515/549, 516/550, 551/581, 552/582, 553/583, 554/584, 555/585, 556/586, 557/587, 558/588, 559/589, 560/590, 561/591, 562/592, 563/593, 564/594, 565/595, 566/596, 567/597, 568/598, 569/599, 570/600, 571/601, 572/602, 573/603, 574/604, 575/605, 576/606, 577/607, 578/608, 579/609, 580/610, 611/651, 612/652, 613/653, 614/654, 615/655, 616/656, 617/657, 618/658, 619/659, 620/660, 621/661, 622/662, 623/663, 624/664, 625/665, 626/666, 627/667, 628/668, 629/669, 630/670, 631/671, 632/672, 633/673, 634/674, 635/675, 636/676, 637/677, 638/678, 639/679, 640/680, 641/681, 642/682, 643/683, 644/684, 645/685, 646/686, 647/687, 648/688, 649/689, 650/690, 691/722, 692/723, 693/724, 694/725, 695/726, 696/727, 697/728, 698/729, 699/730, 700/731, 701/732, 702/733, 703/734, 704/735, 705/736, 706/737, 707/738, 708/739, 709/740, 710/741, 711/742, 712/743, 713/744, 714/745, 715/746, 716/747, 717/748, 718/749, 719/750, 720/751, 721/752, 753/899, 754/900, 755/901, 756/902, 757/903, 758/904, 759/905, 760/906, 761/907, 762/908, 763/909, 764/910, 765/911, 766/912, 767/913, 768/914, 769/915, 770/916, 771/917, 772/918, 773/919, 774/920, 775/921, 776/922, 777/923, 778/924, 779/925, 780/926, 781/927, 782/928, 783/929, 784/930, 785/931, 786/932, 787/933, 788/934, 789/935, 790/936, 791/937, 792/938, 793/939, 794/940, 795/941, 796/942, 797/943, 798/944, 799/945, 800/946, 901/947, 802/948, 803/949, 804/950, 805/951, 806/952, 807/953, 808/854, 809/955, 810/956, 811/957, 812/958, 813/959, 814/960, 815/961, 816/962, 817/963, 818/964, 819/965, 820/966, 821/967, 822/968, 823/969, 824/970, 825/971, 826/972, 827/973, 828/974, 829/975, 830/976, 831/977, 832/978, 833/979, 834/980, 835/981, 836/982, 837/983, 838/984, 839/985, 840/986, 841/987, 842/988, 843/989, 844/990, 845/991, 846/992, 847/993, 848/994, 849/995, 850/996, 851/997, 852/998, 853/999, 854/1000, 855/1001, 856/1002, 857/1003, 858/1004, 859/1005, 860/1006, 861/1007, 862/1008, 863/1009, 864/1010, 865/1011, 866/1012, 867/1013, 868/1014, 869/1015, 870/1016, 871/1017, 872/1018, 873/1019, 874/1020, 875/1021, 876/1022, 877/1023, 878/1024, 879/1025, 880/1026, 881/1027, 882/1028, 883/1029, 884/1030, 885/1031, 886/1032, 887/1033, 888/1034, 889/1035, 890/1036, 891/1037, 892/1038, 893/1039, 894/1040, 895/1041, 896/1042, 897/1043, 898/1044, 1045/1444, 1046/1445, 1047/1446, 1048/1447, 1049/1448, 1050/1449, 1051/1450, 1052/1451, 1053/1452, 1054/1453, 1055/1454, 1056/1455, 1057/1456, 1058/1457, 1059/1458, 1060/1459, 1061/1460, 1062/1461, 1063/1462, 1064/1463, 1065/1464, 1066/1465, 1067/1466, 1068/1467, 1069/1468, 1070/1469, 1071/1470, 1072/1471, 1073/1472, 1074/1473, 1075/1474, 1076/1475, 1077/1476, 1078/1477, 1079/1478, 1080/1479, 1081/1480, 1082/1481, 1083/1482, 1084/1483, 1085/1484, 1086/1485, 1087/1486, 1088/1487, 1089/1488, 1090/1489, 1091/1490, 1092/1491, 1093/1492, 1094/1493, 1095/1494, 1096/1495, 1097/1496, 1098/1497, 1099/1498, 1100/1499, 1101/1500, 1102/1501, 1103/1502, 1104/1503, 1105/1504, 1106/1505, 1107/1506, 1108/1507, 1109/1508, 1110/1509, 1111/1510, 1112/1511, 1113/1512, 1114/1513, 1115/1514, 1116/1515, 1117/1516, 1118/1517, 1119/1518, 1120/1519, 1121/1520, 1122/1521, 1123/1522, 1124/1523, 1125/1524, 1126/1525, 1127/1526, 1128/1527, 1129/1528, 1130/1529, 1131/1530, 1132/1531, 1133/1532, 1134, 1533, 1135/1534, 1136/1535, 1137/1536, 1138/1537, 1139/1538, 1140/1539, 1141/1540, 1142/1541, 1143/1542, 1144/1543, 1145/1544, 1146/1545, 1147/1546, 1148/1547, 1149/1548, 1150/1549, 1151/1550, 1152/1551, 1153/1552, 1154/1553, 1155/1554, 1156/1555, 1157/1556, 1158/1557, 1159/1558, 1160/1559, 1161/1560, 1162/1561, 1163/1562, 1164/1563, 1165/1564, 1166/1565, 1167/1566, 1168/1567, 1169/1568, 1170/1569, 1171/1570, 1172/1571, 1173/1572, 1174/1573, 1175/1574, 1176/1575, 1177/1576, 1178/1577, 1179/1578, 1180/1579, 1181/1580, 1182/1581, 1183/1582, 1184/1583, 1185/1584, 1186/1585, 1187/1586, 1188/1587, 1189/1588, 1190/1589, 1191/1590, 1192/1591, 1193/1592, 1194/1593, 1195/1594, 1196/1595, 1197/1596, 1198/1597, 1199/1598, 1200/1599, 1201/1600, 1202/1601, 1203/1602, 1204/1603, 1205/1604, 1206/1605, 1207/1608, 1208/1607, 1209/1608, 1210/1609, 1211/1610, 1212/1611, 1213/1612, 1214/1613, 1215/1614, 1216/1615, 1217/1616, 1218/1617, 1219/1618, 1220/1619, 1221/1620, 1222/1621, 1223/1622, 1224/1623, 1225/1624, 1226/1625, 1227/1626, 1228/1627, 1229/1628, 1230/1629, 1231/1630, 1232/1631, 1233/1632, 1234/1633, 1235/1634, 1236/1635, 1237/1636, 1238/1637, 1239/1638, 1240/1639, 1241/1340, 1242/1641, 1243/1642, 1244/1643, 1245/1644, 1246/1645, 1247/1646, 1248/1647, 1249/1648, 1250/1649, 1251/1650, 1252/1651, 1253/1652, 1254/1653, 1255/1654, 1256/1655, 1257/1656, 1258/1657, 1259/1658, 1260/1659, 1261/1660, 1262/1661, 1263/1662, 1264/1663, 1265/1664, 1266/1665, 1267/1666, 1268/1667, 1269/1668, 1270/1669, 1271/1670, 1272/1671, 1273/1672, 1274/1673, 1275/1674, 1276/1675, 1277/1676, 1278/1677, 1279/1678, 1280/1679, 1281/1680, 1282/1681, 1283/1682, 1284/1683, 1285/1684, 1286/1685, 1287/1686, 1288/1687, 1289/1688, 1290/1689, 1291/1690, 1292/1691, 1293/1692, 1294/1693, 1295/1694, 1296/1695, 1297/1696, 1298/1697, 1299/1698, 1300/1699, 1301/1700, 1302/1701, 1303/1702, 1304/1703, 1305/1704, 1306/1705, 1307/1706, 1308/1707, 1309/1708, 1310/1709, 1311/1710, 1312/1711, 1313/1712, 1314/1713, 1315/1714, 1316/1715, 1317/1716, 1318/1717, 1319/1718, 1320/1719, 1321/1720, 1322/1721, 1323/1722, 1324/1723, 1325/1724, 1326/1725, 1327/1726, 1328/1727, 1329/1728, 1330/1729, 1331/1730, 1332/1731, 1333/1732, 1334/1733, 1335/1734, 1336/1735, 1337/1736, 1338/1737, 1339/1738, 1340/1739, 1341/1740, 1342/1741, 1343/1742, 1344/1743, 1345/1744, 1346/1745, 1347/1746, 1348/1747, 1349/1748, 1350/1749, 1351/1750, 1352/1751, 1353/1752, 1354/1753, 1355/1754, 1356/1755, 1357/1756, 1358/1757, 1359/1758, 1360/1759, 1361/1760, 1362/1761, 1363/1762, 1364/1763, 1365/1764, 1366/1765, 1367/1766, 1368/1767, 1369/1768, 1370/1769, 1371/1770, 1372/1771, 1373/1772, 1374/1773, 1375/1774, 1376/1775, 1377/1776, 1378/1777, 1379/1778, 1380/1779, 1381/1780, 1382/1781, 1383/1782, 1384/1783, 1385/1784, 1386/1785, 1387/1786, 1388/1787, 1389/1788, 1390/1789, 1391/1790, 1392/1791, 1393/1792, 1394/1793, 1395/1794, 1396/1795, 1397/1796, 1398/1797, 1399/1798, 1400/1799, 1401/1800, 1402/1801, 1403/1802, 1404/1803, 1405/1804, 1406/1805, 1407/1806, 1408/1807, 1409/1808, 1410/1809, 1411/1810, 1412/1811, 1413/1812, 1414/1813, 1415/1814, 1416/1815, 1417/1816, 1418/1817, 1419/1818, 1420/1819, 1421/1820, 1422/1821, 1423/1822, 1424/1823, 1425/1824, 1426/1825, 1427/1826, 1428/1827, 1429/1828, 1430/1829, 1431/1830, 1432/1831, 1433/1832, 1434/1833, 1435/1834, 1436/1835, 1437/1836, 1438/1837, 1439/1838, 1440/1839, 1441/1840, 1442/1841, 1443/1842, wherein the nucleobase sequence of the first modified oligonucleotide comprises the nucleobase sequence of the first SEQ ID NO recited in the pair and the nucleobase sequence of the second modified oligonucleotide comprises the nucleobase sequence of the second SEQ ID NO recited in the pair.

[0315] In certain embodiments, an oligomeric duplex comprises a first oligomeric compound comprising a first modified oligonucleotide consisting of 19 to 30 linked nucleosides and a second oligomeric compound comprising a second modified oligonucleotide consisting of 15 to 29 linked nucleosides, wherein the nucleobase sequences of the first modified oligonucleotide and second modified oligonucleotide comprise any of the following pairs of nucleobase sequences recited in SEQ ID NOs: 329/376, 330/377, 691/722, 694/725, 696/727, 721/752, 759/905, 774/920, 787/933, 848/994, 850/996, 855/1001, 857/1003, 858/1004, 860/1006, 861/1007, 863/1009, 864/1010, 866/1012, 890/1036, 891/1037, 1045/1444, 1050/1449, 1115/1514, 1116/1515, 1142/1541, 1157/1556, 1159/1558, 1161/1560, 1166/1565, 1167/1566, 1229/1628, 1230/1629, 1343/1742, 1360/1759, 1364/1763, 1365/1764, 1402/1801, 1430/1829, 1431/1830, wherein the nucleobase sequence of the first modified oligonucleotide comprises the nucleobase sequence of the first SEQ ID NO recited in the pair and the nucleobase sequence of the second modified oligonucleotide comprises the nucleobase sequence of the second SEQ ID NO recited in the pair.

[0316] In certain embodiments, the first oligomeric compound is an antisense compound. In certain embodiments, the first modified oligonucleotide is an antisense oligonucleotide. In certain embodiments, the second oligomeric compound is a sense compound. In certain embodiments, the second modified oligonucleotide is a sense oligonucleotide. In certain embodiments, the first modified oligonucleotide is an antisense RNAi oligonucleotide. In certain embodiments, the second oligomeric compound is a sense compound. In certain embodiments, the second modified oligonucleotide is a sense RNAi oligonucleotide.

[0317] In certain embodiments, an oligomeric duplex comprises a first oligomeric compound comprising a first modified oligonucleotide consisting of 23 linked nucleosides and a second oligomeric compound comprising a second modified oligonucleotide consisting of 21 linked nucleosides, wherein the nucleobase sequences of the first modified oligonucleotide and second modified oligonucleotide consist of any of the following pairs of nucleobase sequences recited in SEQ ID NOs: 11/40, 12/41, 13/42, 14/43, 15/44, 16/45, 17/46, 18/47, 19/48, 20/49, 21/50, 22/51, 23/52, 24/53, 25/54, 26/55, 27/56, 28/57, 29/58, 30/59, 31/60, 32/61, 33/62, 34/63, 35/64, 36/65, 37/66, 38/67, 39/68, 69/113, 70/114, 71/115, 72/116, 73/117, 74/118, 75/119, 76/120, 77/121, 78/122, 79/123, 80/124, 81/125, 82/126, 83/127, 84/128, 85/129, 86/130, 87/131, 88/132, 89/133, 90/134, 91/135, 92/136, 93/137, 94/138, 95/139, 96/140, 97/141, 98/142, 99/143, 100/144, 101/145, 102/146, 103/147, 104/148, 105/149, 106/150, 107/151, 108/152, 109/153, 110/154, 111/155, 112/156, 157/205, 158/206, 159/207, 160/208, 161/209, 162/210, 163/211, 164/212, 165/213, 166/214, 167/215, 168/216, 169/217, 170/218, 171/219, 172/220, 173/221, 174/222, 175/223, 176/224, 177/225, 178/226, 179/227, 180/228, 181/229, 182/230, 183/231, 184/232, 185/233, 186/234, 187/235, 188/236, 189/237, 190/238, 191/239, 192/240, 193/241, 194/242, 195/243, 196/244, 197/245, 198/246, 199/247, 200/248, 201/249, 202/250, 203/251, 204/252, 253/291, 254/292, 255/293, 256/294, 257/295, 258/296, 259/297, 260/298, 261/299, 262/300, 263/301, 264/302, 265/303, 266/304, 267/305, 268/306, 269/307, 270/308, 271/309, 272/310, 273/311, 274/312, 275/313, 276/314, 277/315, 278/316, 279/317, 280/318, 281/319, 282/320, 283/321, 284/322, 285/323, 286/324, 287/325, 288/326, 289/327, 290/328, 329/376, 330/377, 331/378, 332/379, 333/380, 334/381, 335/382, 336/383, 337/384, 338/385, 339/386, 340/387, 341/388, 342/389, 343/390, 344/391, 345/392, 346/393, 347/394, 348/395, 349/396, 350/397, 351/398, 352/399, 353/400, 354/401, 355/402, 356/403, 357/404, 358/405, 359/406, 360/407, 361/408, 362/409, 363/410, 364/411, 365/412, 366/413, 367/414, 368/415, 369/416, 370/417, 371/418, 372/419, 373/420, 374/421, 375/422, 423/453, 424/454, 425/455, 426/456, 427/457, 428/458, 429/459, 430/460, 431/461, 432/462, 433/463, 434/464, 435/465, 436/466, 437/467, 438/468, 439/469, 440/470, 441/471, 442/472, 443/473, 444/474, 445/475, 446/476, 447/477, 448/478, 449/479, 450/480, 451/481, 452/482, 483/517, 484/518, 485/519, 486/520, 487/521, 488/522, 489/523, 490/524, 491/525, 492/526, 493/527, 494/528, 495/529, 496/530, 497/531, 498/532, 499/533, 500/534, 501/535, 502/536, 503/537, 504/538, 505/539, 506/540, 507/541, 508/542, 509/543, 510/544, 511/545, 512/546, 513/547, 514/548, 515/549, 516/550, 551/581, 552/582, 553/583, 554/584, 555/585, 556/586, 557/587, 558/588, 559/589, 560/590, 561/591, 562/592, 563/593, 564/594, 565/595, 566/596, 567/597, 568/598, 569/599, 570/600, 571/601, 572/602, 573/603, 574/604, 575/605, 576/606, 577/607, 578/608, 579/609, 580/610, 611/651, 612/652, 613/653, 614/654, 615/655, 616/656, 617/657, 618/658, 619/659, 620/660, 621/661, 622/662, 623/663, 624/664, 625/665, 626/666, 627/667, 628/668, 629/669, 630/670, 631/671, 632/672, 633/673, 634/674, 635/675, 636/676, 637/677, 638/678, 639/679, 640/680, 641/681, 642/682, 643/683, 644/684, 645/685, 646/686, 647/687, 648/688, 649/689, 650/690, 691/722, 692/723, 693/724, 694/725, 695/726, 696/727, 697/728, 698/729, 699/730, 700/731, 701/732, 702/733, 703/734, 704/735, 705/736, 706/737, 707/738, 708/739, 709/740, 710/741, 711/742, 712/743, 713/744, 714/745, 715/746, 716/747, 717/748, 718/749, 719/750, 720/751, 721/752, 753/899, 754/900, 755/901, 756/902, 757/903, 758/904, 759/905, 760/906, 761/907, 762/908, 763/909, 764/910, 765/911, 766/912, 767/913, 768/914, 769/915, 770/916, 771/917, 772/918, 773/919, 774/920, 775/921, 776/922, 777/923, 778/924, 779/925, 780/926, 781/927, 782/928, 783/929, 784/930, 785/931, 786/932, 787/933, 788/934, 789/935, 790/936, 791/937, 792/938, 793/939, 794/940, 795/941, 796/942, 797/943, 798/944, 799/945, 800/946, 901/947, 802/948, 803/949, 804/950, 805/951, 806/952, 807/953, 808/854, 809/955, 810/956, 811/957, 812/958, 813/959, 814/960, 815/961, 816/962, 817/963, 818/964, 819/965, 820/966, 821/967, 822/968, 823/969, 824/970, 825/971, 826/972, 827/973, 828/974, 829/975, 830/976, 831/977, 832/978, 833/979, 834/980, 835/981, 836/982, 837/983, 838/984, 839/985, 840/986, 841/987, 842/988, 843/989, 844/990, 845/991, 846/992, 847/993, 848/994, 849/995, 850/996, 851/997, 852/998, 853/999, 854/1000, 855/1001, 856/1002, 857/1003, 858/1004, 859/1005, 860/1006, 861/1007, 862/1008, 863/1009, 864/1010, 865/1011, 866/1012, 867/1013, 868/1014, 869/1015, 870/1016, 871/1017, 872/1018, 873/1019, 874/1020, 875/1021, 876/1022, 877/1023, 878/1024, 879/1025, 880/1026, 881/1027, 882/1028, 883/1029, 884/1030, 885/1031, 886/1032, 887/1033, 888/1034, 889/1035, 890/1036, 891/1037, 892/1038, 893/1039, 894/1040, 895/1041, 896/1042, 897/1043, 898/1044, 1045/1444, 1046/1445, 1047/1446, 1048/1447, 1049/1448, 1050/1449, 1051/1450, 1052/1451, 1053/1452, 1054/1453, 1055/1454, 1056/1455, 1057/1456, 1058/1457, 1059/1458, 1060/1459, 1061/1460, 1062/1461, 1063/1462, 1064/1463, 1065/1464, 1066/1465, 1067/1466, 1068/1467, 1069/1468, 1070/1469, 1071/1470, 1072/1471, 1073/1472, 1074/1473, 1075/1474, 1076/1475, 1077/1476, 1078/1477, 1079/1478, 1080/1479, 1081/1480, 1082/1481, 1083/1482, 1084/1483, 1085/1484, 1086/1485, 1087/1486, 1088/1487, 1089/1488, 1090/1489, 1091/1490, 1092/1491, 1093/1492, 1094/1493, 1095/1494, 1096/1495, 1097/1496, 1098/1497, 1099/1498, 1100/1499, 1101/1500, 1102/1501, 1103/1502, 1104/1503, 1105/1504, 1106/1505, 1107/1506, 1108/1507, 1109/1508, 1110/1509, 1111/1510, 1112/1511, 1113/1512, 1114/1513, 1115/1514, 1116/1515, 1117/1516, 1118/1517, 1119/1518, 1120/1519, 1121/1520, 1122/1521, 1123/1522, 1124/1523, 1125/1524, 1126/1525, 1127/1526, 1128/1527, 1129/1528, 1130/1529, 1131/1530, 1132/1531, 1133/1532, 1134, 1533, 1135/1534, 1136/1535, 1137/1536, 1138/1537, 1139/1538, 1140/1539, 1141/1540, 1142/1541, 1143/1542, 1144/1543, 1145/1544, 1146/1545, 1147/1546, 1148/1547, 1149/1548, 1150/1549, 1151/1550, 1152/1551, 1153/1552, 1154/1553, 1155/1554, 1156/1555, 1157/1556, 1158/1557, 1159/1558, 1160/1559, 1161/1560, 1162/1561, 1163/1562, 1164/1563, 1165/1564, 1166/1565, 1167/1566, 1168/1567, 1169/1568, 1170/1569, 1171/1570, 1172/1571, 1173/1572, 1174/1573, 1175/1574, 1176/1575, 1177/1576, 1178/1577, 1179/1578, 1180/1579, 1181/1580, 1182/1581, 1183/1582, 1184/1583, 1185/1584, 1186/1585, 1187/1586, 1188/1587, 1189/1588, 1190/1589, 1191/1590, 1192/1591, 1193/1592, 1194/1593, 1195/1594, 1196/1595, 1197/1596, 1198/1597, 1199/1598, 1200/1599, 1201/1600, 1202/1601, 1203/1602, 1204/1603, 1205/1604, 1206/1605, 1207/1608, 1208/1607, 1209/1608, 1210/1609, 1211/1610, 1212/1611, 1213/1612, 1214/1613, 1215/1614, 1216/1615, 1217/1616, 1218/1617, 1219/1618, 1220/1619, 1221/1620, 1222/1621, 1223/1622, 1224/1623, 1225/1624, 1226/1625, 1227/1626, 1228/1627, 1229/1628, 1230/1629, 1231/1630, 1232/1631, 1233/1632, 1234/1633, 1235/1634, 1236/1635, 1237/1636, 1238/1637, 1239/1638, 1240/1639, 1241/1340, 1242/1641, 1243/1642, 1244/1643, 1245/1644, 1246/1645, 1247/1646, 1248/1647, 1249/1648, 1250/1649, 1251/1650, 1252/1651, 1253/1652, 1254/1653, 1255/1654, 1256/1655, 1257/1656, 1258/1657, 1259/1658, 1260/1659, 1261/1660, 1262/1661, 1263/1662, 1264/1663, 1265/1664, 1266/1665, 1267/1666, 1268/1667, 1269/1668, 1270/1669, 1271/1670, 1272/1671, 1273/1672, 1274/1673, 1275/1674, 1276/1675, 1277/1676, 1278/1677, 1279/1678, 1280/1679, 1281/1680, 1282/1681, 1283/1682, 1284/1683, 1285/1684, 1286/1685, 1287/1686, 1288/1687, 1289/1688, 1290/1689, 1291/1690, 1292/1691, 1293/1692, 1294/1693, 1295/1694, 1296/1695, 1297/1696, 1298/1697, 1299/1698, 1300/1699, 1301/1700, 1302/1701, 1303/1702, 1304/1703, 1305/1704, 1306/1705, 1307/1706, 1308/1707, 1309/1708, 1310/1709, 1311/1710, 1312/1711, 1313/1712, 1314/1713, 1315/1714, 1316/1715, 1317/1716, 1318/1717, 1319/1718, 1320/1719, 1321/1720, 1322/1721, 1323/1722, 1324/1723, 1325/1724, 1326/1725, 1327/1726, 1328/1727, 1329/1728, 1330/1729, 1331/1730, 1332/1731, 1333/1732, 1334/1733, 1335/1734, 1336/1735, 1337/1736, 1338/1737, 1339/1738, 1340/1739, 1341/1740, 1342/1741, 1343/1742, 1344/1743, 1345/1744, 1346/1745, 1347/1746, 1348/1747, 1349/1748, 1350/1749, 1351/1750, 1352/1751, 1353/1752, 1354/1753, 1355/1754, 1356/1755, 1357/1756, 1358/1757, 1359/1758, 1360/1759, 1361/1760, 1362/1761, 1363/1762, 1364/1763, 1365/1764, 1366/1765, 1367/1766, 1368/1767, 1369/1768, 1370/1769, 1371/1770, 1372/1771, 1373/1772, 1374/1773, 1375/1774, 1376/1775, 1377/1776, 1378/1777, 1379/1778, 1380/1779, 1381/1780, 1382/1781, 1383/1782, 1384/1783, 1385/1784, 1386/1785, 1387/1786, 1388/1787, 1389/1788, 1390/1789, 1391/1790, 1392/1791, 1393/1792, 1394/1793, 1395/1794, 1396/1795, 1397/1796, 1398/1797, 1399/1798, 1400/1799, 1401/1800, 1402/1801, 1403/1802, 1404/1803, 1405/1804, 1406/1805, 1407/1806, 1408/1807, 1409/1808, 1410/1809, 1411/1810, 1412/1811, 1413/1812, 1414/1813, 1415/1814, 1416/1815, 1417/1816, 1418/1817, 1419/1818, 1420/1819, 1421/1820, 1422/1821, 1423/1822, 1424/1823, 1425/1824, 1426/1825, 1427/1826, 1428/1827, 1429/1828, 1430/1829, 1431/1830, 1432/1831, 1433/1832, 1434/1833, 1435/1834, 1436/1835, 1437/1836, 1438/1837, 1439/1838, 1440/1839, 1441/1840, 1442/1841, 1443/1842, wherein the nucleobase sequence of the first modified oligonucleotide comprises the nucleobase sequence of the first SEQ ID NO recited in the pair and the nucleobase sequence of the second modified oligonucleotide comprises the nucleobase sequence of the second SEQ ID NO recited in the pair.

[0318] In certain embodiments, an oligomeric duplex comprises a first oligomeric compound comprising a first modified oligonucleotide consisting of 15 to 30 linked nucleosides and a second oligomeric compound comprising a second modified oligonucleotide consisting of 15 to 29 linked nucleosides, wherein the nucleobase sequences of the first modified oligonucleotide and second modified oligonucleotide consists of any of the following pairs of nucleobase sequences recited in SEQ ID NOs: 329/376, 330/377, 691/722, 694/725, 696/727, 721/752, 759/905, 774/920, 787/933, 848/994, 850/996, 855/1001, 857/1003, 858/1004, 860/1006, 861/1007, 863/1009, 864/1010, 866/1012, 890/1036, 891/1037, 1045/1444, 1050/1449, 1115/1514, 1116/1515, 1142/1541, 1157/1556, 1159/1558, 1161/1560, 1166/1565, 1167/1566, 1229/1628, 1230/1629, 1343/1742, 1360/1759, 1364/1763, 1365/1764, 1402/1801, 1430/1829, 1431/1830, wherein the nucleobase sequence of the first modified oligonucleotide comprises the nucleobase sequence of the first SEQ ID NO recited in the pair and the nucleobase sequence of the second modified oligonucleotide comprises the nucleobase sequence of the second SEQ ID NO recited in the pair.

[0319] In certain embodiments, the first oligomeric compound is an antisense compound. In certain embodiments, the first modified oligonucleotide is an antisense oligonucleotide. In certain embodiments, the second oligomeric compound is a sense compound. In certain embodiments, the second modified oligonucleotide is a sense oligonucleotide. In certain embodiments, the first modified oligonucleotide is an antisense RNAi oligonucleotide. In certain embodiments, the second oligomeric compound is a sense compound. In certain embodiments, the second modified oligonucleotide is a sense RNAi oligonucleotide.

[0320] In any of the oligomeric duplexes described herein, at least one nucleoside of the first modified oligonucleotide and/or the second modified oligonucleotide can comprise a modified sugar moiety. Examples of suitable modified sugar moieties include, but are not limited to, a bicyclic sugar moiety, such as a 2′-4′ bridge selected from —O—CH2- and —O—CH(CH3)-, and a non-bicyclic sugar moiety, such as a 2′-MOE sugar moiety, a 2′-F sugar moiety, a 2′-OMe sugar moiety, or a 2′-NMA sugar moiety. In certain embodiments, at least one nucleoside of the first modified oligonucleotide and/or the second modified oligonucleotide can comprise an unmodified 2′-deoxyribosyl sugar moiety. In certain embodiments, at least 80%, at least 90%, or 100% of the nucleosides of the first modified oligonucleotide and/or the second modified oligonucleotide comprises a modified sugar moiety selected from 2′-F and 2′-OMe. In certain embodiments, one or more 2′-F sugar moieties have a configuration other than 2′-β-D-ribosyl. In certain embodiments, one or more 2′-F sugar moieties is in the 2′-β-D-xylosyl configuration.

[0321] In any of the oligomeric duplexes described herein, at least one nucleoside of the first modified oligonucleotide and/or the second modified oligonucleotide can comprise a sugar surrogate. Examples of suitable sugar surrogates include, but are not limited to, morpholino, modified morpholino, hexitol nucleic acid (HNA), fluro-hexitol nucleic acid (FHNA), peptide nucleic acid (PNA), glycol nucleic acid (GNA), and unlocked nucleic acid (UNA). In certain embodiments, at least one nucleoside of the first modified oligonucleotide comprises a sugar surrogate, which can be a GNA.

[0322] In any of the oligomeric duplexes described herein, the first modified oligonucleotide has a sugar motif (from 5′ to 3′) of yfyfyfyfyfyfyfyfyfyfyyy or yfyyyfyyyyyyyfyfyyyyyyy, wherein each “y” represents a 2′-OMe sugar moiety and each “f” represents a 2′-F sugar moiety. In any of the oligomeric duplexes described herein, the second modified oligonucleotide has a sugar motif (from 5′ to 3′) of fyfyfyfyfyfyfyfyfyfyf or yyyyyyfyfffyyyyyyyyyy, wherein each “y” represents a 2′-OMe sugar moiety and each “f” represents a 2′-F sugar moiety.

[0323] In any of the oligomeric duplexes described herein, the modified oligonucleotide of the first oligomeric compound has a sugar motif (from 5′ to 3′) of: yfyfyfyfyfyfyfyfyfyfyyy and the second modified oligonucleotide has a sugar motif (from 5′ to 3′) of fyfyfyfyfyfyfyfyfyfyf, wherein each “y” represents a 2′-OMe sugar moiety and each “f” represents a 2′-F sugar moiety. In any of the oligomeric duplexes described herein, the modified oligonucleotide of the first oligomeric compound has a sugar motif (from 5′ to 3′) of yfyyyfyyyyyyyfyfyyyyyyy and the second modified oligonucleotide has a sugar motif (from 5′ to 3′) of yyyyyyfyfffyyyyyyyyyy, wherein each “y” represents a 2′-OMe sugar moiety and each “f” represents a 2′-F sugar moiety.

[0324] In any of the oligomeric duplexes described herein, at least one internucleoside linkage of the first modified oligonucleotide and/or the second modified oligonucleotide can comprise a modified internucleoside linkage. In certain embodiments, the modified internucleoside linkage is a phosphorothioate internucleoside linkage. In certain embodiments, at least one of the first, second, or third internucleoside linkages from the 5′ end and/or the 3′ end of the first modified oligonucleotide comprises a phosphorothioate linkage. In certain embodiments, at least one of the first, second, or third internucleoside linkages from the 5′ end and/or the 3′ end of the second modified oligonucleotide comprises a phosphorothioate linkage. In certain embodiments, the modified internucleoside linkage is a mesyl phosphoramidate internucleoside linkage. In certain embodiments, at least one of the first or second internucleoside linkages from the 5′ end and/or the 3′ end of the first modified oligonucleotide comprises a mesyl phosphoramidate internucleoside linkage. In certain embodiments, at least one of the first or second internucleoside linkages from the 5′ end and/or the 3′ end of the second modified oligonucleotide comprises a mesyl phosphoramidate internucleoside linkage.

[0325] In any of the oligomeric duplexes described herein, at least one internucleoside linkage of the first modified oligonucleotide and/or the second modified oligonucleotide can comprise a phosphodiester internucleoside linkage.

[0326] In any of the oligomeric duplexes described herein, each internucleoside linkage of the first modified oligonucleotide and/or the second modified oligonucleotide can be independently selected from a phosphodiester, a phosphorothioate, or a mesyl phosphoramidate internucleoside linkage.

[0327] In any of the oligomeric duplexes described herein, the internucleoside linkage motif of the first modified oligonucleotide can be ssooooooooooooooooooss, wherein each “o” represents a phosphodiester internucleoside linkage and each “s” represents a phosphorothioate internucleoside linkage. In any of the oligomeric duplexes described herein, the internucleoside linkage motif of the second modified oligonucleotide can be ssooooooooooooooooss, wherein each “o” represents a phosphodiester internucleoside linkage and each “s” represents a phosphorothioate internucleoside linkage.

[0328] In any of the oligomeric duplexes described herein, at least one nucleobase of the first modified oligonucleotide and/or the second modified oligonucleotide can be a modified nucleobase. In certain embodiments, the modified nucleobase is 5-methylcytosine.

[0329] In any of the oligomeric duplexes described herein, the first modified oligonucleotide can comprise a stabilized phosphate group attached to the 5′ position of the 5′-most nucleoside. In certain embodiments, the stabilized phosphate group comprises a cyclopropyl phosphonate or an (E)-vinyl phosphonate.

[0330] In any of the oligomeric duplexes described herein, the first modified oligonucleotide can comprise a conjugate group. In certain embodiments, the conjugate group comprises a conjugate linker and a conjugate moiety. In certain embodiments, the conjugate group is attached to the first modified oligonucleotide at the 5′-end of the first modified oligonucleotide. In certain embodiments, the conjugate group is attached to the first modified oligonucleotide at the 3′-end of the modified oligonucleotide. In certain embodiments, the conjugate group comprises N-acetyl galactosamine. In certain embodiments, the conjugate group comprises a cell-targeting moiety having an affinity for transferrin receptor (TfR), also known as TfR1 and CD71. In certain embodiments, the conjugate group comprises an anti-TfR1 antibody or fragment thereof. In certain embodiments, the conjugate group comprises a protein or peptide capable of binding TfR1. In certain embodiments, the conjugate group comprises an aptamer capable of binding TfR1. In certain embodiments, conjugate groups may be selected from any of a C22 alkyl, C20 alkyl, C16 alkyl, C10 alkyl, C21 alkyl, C19 alkyl, C18 alkyl, C17 alkyl, C15 alkyl, C14 alkyl, C13 alkyl, C12 alkyl, C11 alkyl, C9 alkyl, C8 alkyl, C7 alkyl, C6 alkyl, C5 alkyl, C22 alkenyl, C20 alkenyl, C16 alkenyl, C10 alkenyl, C21 alkenyl, C19 alkenyl, C18 alkenyl, C17 alkenyl, C15 alkenyl, C14 alkenyl, C13 alkenyl, C12 alkenyl, C11 alkenyl, C9 alkenyl, C8 alkenyl, C7 alkenyl, C6 alkenyl, or C5 alkenyl. In certain embodiments, conjugate groups may be selected from any of C22 alkyl, C20 alkyl, C16 alkyl, C10 alkyl, C21 alkyl, C19 alkyl, C18 alkyl, C17 alkyl, C15 alkyl, C14 alkyl, C13 alkyl, C12 alkyl, C11 alkyl, C9 alkyl, C8 alkyl, C7 alkyl, C6 alkyl, and C5 alkyl, where the alkyl chain has one or more unsaturated bonds.

[0331] In any of the oligomeric duplexes described herein, the second modified oligonucleotide can comprise a conjugate group. In certain embodiments, the conjugate group comprises a conjugate linker and a conjugate moiety. In certain embodiments, the conjugate group is attached to the second modified oligonucleotide at the 5′-end of the second modified oligonucleotide. In certain embodiments, the conjugate group is attached to the second modified oligonucleotide at the 3′-end of the modified oligonucleotide. In certain embodiments, the conjugate group comprises N-acetyl galactosamine. In certain embodiments, the conjugate group comprises a cell-targeting moiety having an affinity for transferrin receptor (TfR), also known as TfR1 and CD71. In certain embodiments, the conjugate group comprises an anti-TfR1 antibody or fragment thereof. In certain embodiments, the conjugate group comprises a protein or peptide capable of binding TfR1. In certain embodiments, the conjugate group comprises an aptamer capable of binding TfR1. In certain embodiments, conjugate groups may be selected from any of a C22 alkyl, C20 alkyl, C16 alkyl, C10 alkyl, C21 alkyl, C19 alkyl, C18 alkyl, C17 alkyl, C15 alkyl, C14 alkyl, C13 alkyl, C12 alkyl, C11 alkyl, C9 alkyl, C8 alkyl, C7 alkyl, C6 alkyl, C5 alkyl, C22 alkenyl, C20 alkenyl, C16 alkenyl, C10 alkenyl, C21 alkenyl, C19 alkenyl, C18 alkenyl, C17 alkenyl, C15 alkenyl, C14 alkenyl, C13 alkenyl, C12 alkenyl, C11 alkenyl, C9 alkenyl, C8 alkenyl, C7 alkenyl, C6 alkenyl, or C5 alkenyl. In certain embodiments, conjugate groups may be selected from any of C22 alkyl, C20 alkyl, C16 alkyl, C10 alkyl, C21 alkyl, C19 alkyl, C18 alkyl, C17 alkyl, C15 alkyl, C14 alkyl, C13 alkyl, C12 alkyl, C11 alkyl, C9 alkyl, C8 alkyl, C7 alkyl, C6 alkyl, and C5 alkyl, where the alkyl chain has one or more unsaturated bonds.

[0332] In certain embodiments, an antisense agent comprises an antisense compound, which comprises an oligomeric compound or an oligomeric duplex described herein. In certain embodiments, an antisense agent, which can comprise an oligomeric compound or an oligomeric duplex described herein, is an RNAi agent capable of reducing the amount of Tau nucleic acid through the activation of RISC/Ago2.

[0333] Certain embodiments provide an oligomeric agent comprising two or more oligomeric duplexes. In certain embodiments, an oligomeric agent comprises two or more of any of the oligomeric duplexes described herein. In certain embodiments, an oligomeric agent comprises two or more of the same oligomeric duplex, which can be any of the oligomeric duplexes described herein. In certain embodiments, the two or more oligomeric duplexes are linked together. In certain embodiments, the two or more oligomeric duplexes are covalently linked together. In certain embodiments, the second modified oligonucleotides of two or more oligomeric duplexes are covalently linked together. In certain embodiments, the second modified oligonucleotides of two or more oligomeric duplexes are covalently linked together at their 3′ ends. In certain embodiments, the two or more oligomeric duplexes are covalently linked together by a glycol linker, such as a tetraethylene glycol linker.

### Certain Terminal Groups

[0334] In certain embodiments, oligomeric compounds comprise a terminal group. In certain such embodiments, oligomeric compounds comprise a phosphorus-containing group at the 5′-end of the antisense oligonucleotide and/or the sense oligonucleotide. In certain embodiments, the terminal group is a phosphate stabilized phosphate group. The 5′-end phosphorus-containing group can be 5′-end phosphate (5′-P), 5′-end phosphorothioate (5′-PS), 5′-end phosphorodithioate (5′-PS₂), 5′-end vinylphosphonate (5′-VP), 5′-end methylphosphonate (MePhos) or 5′-deoxy-5′-C-malonyl. When the 5′-end phosphorus-containing group is 5′-end vinylphosphonate, the 5′VP can be either 5′-E-VP isomer (i.e., trans-vinylphosphate), 5′-Z—VP isomer (i.e., cis-vinylphosphate), or mixtures thereof. Although such phosphate group can be attached to either the antisense oligonucleotide or the sense oligonucleotide, it will typically be attached to the antisense oligonucleotide as that has been shown to improve activity of certain RNAi agents. See, e.g., Prakash et al., Nucleic Acids Res., 43(6):2993-3011, 2015; Elkayam, et al., Nucleic Acids Res., 45(6):3528-3536, 2017; Parmar, et al. ChemBioChem, 17(11)₉₈₅-989; 2016; Harastzi, et al., Nucleic Acids Res., 45(13):7581-7592, 2017. In certain embodiments, the phosphate stabilizing group is 5′-cyclopropyl phosphonate. See e.g., WO 2018/027106.

### Certain Conjugated Oligomeric Compounds

[0335] In certain embodiments, the oligomeric compounds comprise one or more conjugate groups. Conjugate groups consist of one or more conjugate moiety and a conjugate linker which links the conjugate moiety to an oligonucleotide of an oligomeric compound. Conjugate groups may be attached to either or both ends and/or at any internal position of an oligonucleotide. In certain embodiments, conjugate groups modify one or more properties of oligomeric compound, including, but not limited to, pharmacodynamics, pharmacokinetics, stability, binding, absorption, tissue distribution, cellular distribution, cellular uptake, charge and clearance.

[0336] Conjugation of one or more carbohydrate moieties to an oligomeric compound can optimize one or more properties of the oligomeric compound. In certain embodiments, the carbohydrate moiety is attached to a modified subunit of the oligomeric compound. For example, the ribose sugar of one or more ribonucleotide subunits of an oligomeric compound can be replaced with another moiety, e.g. a non-carbohydrate (preferably cyclic) carrier to which is attached a carbohydrate ligand. A ribonucleotide subunit in which the ribose sugar of the subunit has been so replaced is referred to herein as a ribose replacement modification subunit (RRMS), which is a modified sugar moiety. A cyclic carrier may be a carbocyclic ring system, i.e., one or more ring atoms may be a heteroatom, e.g., nitrogen, oxygen, sulphur. The cyclic carrier may be a monocyclic ring system, or may contain two or more rings, e.g. fused rings. The cyclic carrier may be a fully saturated ring system, or it may contain one or more double bonds.

### A. Certain Specific Conjugate Groups

[0337] Certain conjugate groups and conjugate moieties have been described previously, for example: cholesterol moiety (Letsinger et al., Proc. Natl. Acad. Sci. USA, 1989, 86, 6553-6556), cholic acid (Manoharan et al., Bioorg. Med. Chem. Lett., 1994, 4, 1053-1060), a thioether, e.g., hexyl-S-tritylthiol (Manoharan et al., Ann. N.Y. Acad. Sci., 1992, 660, 306-309; Manoharan et al., Bioorg. Med. Chem. Lett., 1993, 3, 2765-2770), a thiocholesterol (Oberhauser et al., Nucl. Acids Res., 1992, 20, 533-538), an aliphatic chain, e.g., do-decan-diol or undecyl residues (Saison-Behmoaras et al., EMBO J., 1991, 10, 1111-1118; Kabanov et al., FEBS Lett., 1990, 259, 327-330; Svinarchuk et al., Biochimie, 1993, 75, 49-54), a phospholipid, e.g., di-hexadecyl-rac-glycerol or triethyl-ammonium 1,2-di-O-hexadecyl-rac-glycero-3-H-phosphonate (Manoharan et al., Tetrahedron Lett., 1995, 36, 3651-3654; Shea et al., Nucl. Acids Res., 1990, 18, 3777-3783), a polyamine or a polyethylene glycol chain (Manoharan et al., Nucleosides & Nucleotides, 1995, 14, 969-973), or adamantane acetic, a palmityl moiety (Mishra et al., Biochim. Biophys. Acta, 1995, 1264, 229-237), an octadecylamine or hexylamino-carbonyl-oxycholesterol moiety (Crooke et al., J Pharmacol. Exp. Ther., 1996, i, 923-937), a tocopherol group (Nishina et al., Molecular Therapy Nucleic Acids, 2015, 4, e220; doi:10.1038/mtna.2014.72 and Nishina et al., Molecular Therapy, 2008, 16, 734-740), or a GalNAc cluster (e.g., WO2014/179620).

### 1. Conjugate Moieties

[0338] Conjugate moieties include, without limitation, intercalators, reporter molecules, polyamines, polyamides, peptides, carbohydrates (e.g., GalNAc), vitamin moieties, polyethylene glycols, thioethers, polyethers, cholesterols, thiocholesterols, cholic acid moieties, folate, lipids, phospholipids, biotin, phenazine, phenanthridine, anthraquinone, adamantane, acridine, fluoresceins, rhodamines, coumarins, fluorophores, and dyes.

[0339] In certain embodiments, a conjugate moiety comprises an active drug substance, for example, aspirin, warfarin, phenylbutazone, ibuprofen, suprofen, fen-bufen, ketoprofen, (S)-(+)-pranoprofen, carprofen, dansylsarcosine, 2,3,5-triiodobenzoic acid, fingolimod, flufenamic acid, folinic acid, a benzothiadiazide, chlorothiazide, a diazepine, indo-methicin, a barbiturate, a cephalosporin, a sulfa drug, an antidiabetic, an antibacterial, or an antibiotic.

### 2. Conjugate Linkers

[0340] Conjugate moieties are attached to an oligomeric compound through conjugate linkers. In certain embodiments, a conjugate group is a single chemical bond (i.e. conjugate moiety is attached to an oligonucleotide via a conjugate linker through a single bond). In certain embodiments, the conjugate linker comprises a chain structure, such as a hydrocarbyl chain, or an oligomer of repeating units, such as ethylene glycol, nucleosides, or amino acid units.

[0341] In certain embodiments, a conjugate linker comprises a pyrrolidine.

[0342] In certain embodiments, a conjugate linker comprises one or more groups selected from alkyl, amino, oxo, amide, disulfide, polyethylene glycol, ether, thioether, and hydroxylamino. In certain such embodiments, the conjugate linker comprises groups selected from alkyl, amino, oxo, amide and ether groups. In certain embodiments, the conjugate linker comprises groups selected from alkyl and amide groups. In certain embodiments, the conjugate linker comprises groups selected from alkyl and ether groups. In certain embodiments, the conjugate linker comprises at least one phosphorus moiety. In certain embodiments, the conjugate linker comprises at least one phosphate group. In certain embodiments, the conjugate linker includes at least one neutral linking group.

[0343] In certain embodiments, conjugate linkers, including the conjugate linkers described above, are bifunctional linking moieties, e.g., those known in the art to be useful for attaching conjugate groups to parent compounds, such as the oligonucleotides provided herein. In general, a bifunctional linking moiety comprises at least two functional groups. One of the functional groups is selected to bind to a particular site on a compound and the other is selected to bind to a conjugate group. Examples of functional groups used in a bifunctional linking moiety include, but are not limited to, electrophiles for reacting with nucleophilic groups and nucleophiles for reacting with electrophilic groups. In certain embodiments, bifunctional linking moieties comprise one or more groups selected from amino, hydroxyl, carboxylic acid, thiol, alkyl, alkenyl, and alkynyl.

[0344] Examples of conjugate linkers include, but are not limited to, pyrrolidine, 8-amino-3,6-dioxaoctanoic acid (ADO), succinimidyl 4-(N-maleimidomethyl) cyclohexane-1-carboxylate (SMCC) and 6-aminohexanoic acid (AHEX or AHA). Other conjugate linkers include, but are not limited to, substituted or unsubstituted C₁-C₁₀ alkyl, substituted or unsubstituted C₂-C₁₀ alkenyl, or substituted or unsubstituted C₂-C₁₀ alkynyl, wherein a nonlimiting list of preferred substituent groups includes hydroxyl, amino, alkoxy, carboxy, benzyl, phenyl, nitro, thiol, thioalkoxy, halogen, alkyl, aryl, alkenyl, and alkynyl.

[0345] In certain embodiments, conjugate linkers comprise 1-5 linker-nucleosides. In certain embodiments, such linker-nucleosides are modified nucleosides. In certain embodiments, such linker-nucleosides comprise a modified sugar moiety. In certain embodiments, linker-nucleosides are unmodified. In certain embodiments, linker-nucleosides comprise an optionally protected heterocyclic base selected from a purine, substituted purine, pyrimidine or substituted pyrimidine. In certain embodiments, a cleavable moiety is a nucleoside selected from uracil, thymine, cytosine, 4-N-benzoylcytosine, 5-methylcytosine, 4-N-benzoyl-5-methylcytosine, adenine, 6-N-benzoyladenine, guanine and 2-N-isobutyrylguanine. It is typically desirable for linker-nucleosides to be cleaved from the compound after it reaches a target tissue. Accordingly, linker-nucleosides are typically linked to one another and to the remainder of the compound through cleavable bonds. In certain embodiments, such cleavable bonds are phosphodiester bonds.

[0346] Herein, linker-nucleosides are not considered to be part of the oligonucleotide. Accordingly, in embodiments in which a oligomeric compound comprises two oligonucleotides each consisting of a specified number or range of linked nucleosides and the antisense oligonucleotide having a specified percent complementarity to a reference nucleic acid, and the oligomeric compound also comprises a conjugate group comprising a conjugate linker comprising linker-nucleosides, those linker-nucleosides are not counted toward the length of the oligonucleotides of an oligomeric compound and are not used in determining the percent complementarity of the antisense oligonucleotide with the reference nucleic acid. Unless otherwise indicated, conjugate linkers comprise no more than 10 linker-nucleosides. In certain embodiments, conjugate linkers comprise no more than 5 linker-nucleosides. In certain embodiments, conjugate linkers comprise no more than 3 linker-nucleosides. In certain embodiments, conjugate linkers comprise no more than 2 linker-nucleosides. In certain embodiments, conjugate linkers comprise no more than 1 linker-nucleoside.

[0347] In certain embodiments, it is desirable for a conjugate group to be cleaved from the oligomeric compound. For example, in certain circumstances, oligomeric compounds comprising a particular conjugate moiety are better taken up by a particular cell type, but once the oligomeric compound has been taken up, it is desirable that the conjugate group be cleaved to release the unconjugated or parent oligomeric compound. Thus, certain conjugates may comprise one or more cleavable moieties, typically within the conjugate linker. In certain embodiments, a cleavable moiety is a cleavable bond. In certain embodiments, a cleavable moiety is a group of atoms comprising at least one cleavable bond. In certain embodiments, a cleavable moiety comprises a group of atoms having one, two, three, four, or more than four cleavable bonds. In certain embodiments, a cleavable moiety is selectively cleaved inside a cell or subcellular compartment, such as a lysosome. In certain embodiments, a cleavable moiety is selectively cleaved by endogenous enzymes, such as nucleases.

[0348] In certain embodiments, a cleavable bond is selected from among an amide, an ester, an ether, one or both esters of a phosphodiester, a phosphate ester, a carbamate, and a disulfide. In certain embodiments, a cleavable bond is one or both of the esters of a phosphodiester. In certain embodiments, a cleavable moiety comprises a phosphate or phosphodiester. In certain embodiments, the cleavable moiety is a phosphate linkage between an oligonucleotide and a conjugate moiety or conjugate group.

[0349] In certain embodiments, a cleavable moiety comprises or consists of one or more linker-nucleosides. In certain such embodiments, one or more linker-nucleosides are linked to one another and/or to the remainder of the compound through cleavable bonds. In certain embodiments, such cleavable bonds are unmodified phosphodiester bonds. In certain embodiments, a cleavable moiety is 2′-deoxy nucleoside that is attached to either the 3′ or 5′-terminal nucleoside of an oligonucleotide by a phosphate internucleoside linkage and covalently attached to the remainder of the conjugate linker or conjugate moiety by a phosphate or phosphorothioate linkage. In certain such embodiments, the cleavable moiety is 2′-deoxyadenosine.

### 3. Certain Cell-Targeting Conjugate Moieties

[0350] In certain embodiments, each ligand of a cell-targeting moiety has an affinity for at least one type of receptor on a target cell. In certain embodiments, each ligand has an affinity for at least one type of receptor on the surface of a mammalian liver cell. In certain embodiments, each ligand has an affinity for the hepatic asialoglycoprotein receptor (ASGP-R). In certain embodiments, each ligand is a carbohydrate.

[0351] In certain embodiments, the cell-targeting moiety targets neurons. In certain embodiments, the cell-targeting moiety targets a neurotransmitter receptor. In certain embodiments, the cell targeting moiety targets a neurotransmitter transporter. In certain embodiments, the cell targeting moiety targets a GABA transporter. See e.g., WO 2011/131693, WO 2014/064257.

### Certain Motifs

[0352] Oligomeric duplexes can be described by motif or by specific features. In certain embodiments, an oligomeric duplex having a motif or specific feature described herein is an antisense agent.

[0353] In certain embodiments, the oligomeric duplexes described herein comprise:
[0354] (a) a sense oligonucleotide having:
   [0355] (i) a length of 21 nucleosides;
   [0356] (ii) a conjugate attached to the 3′-end or the 5′-end; and
   [0357] (iii) 2′-F modifications at positions 1, 3, 5, 7, 9 to 11, 13, 17, 19, and 21, and 2′-OMe modifications at positions 2, 4, 6, 8, 12, 14 to 16, 18, and 20 (counting from the 5′ end);
[0358] and
[0359] (b) an antisense oligonucleotide having:
   [0360] (i) a length of 23 nucleosides;
   [0361] (ii) 2′-OMe modifications at positions 1, 3, 5, 9, 11 to 13, 15, 17, 19, 21, and 23, and 2′-F modifications at positions 2, 4, 6 to 8, 10, 14, 16, 18, 20, and 22 (counting from the 5′ end); and
   [0362] (iii) phosphorothioate internucleoside linkages between nucleoside positions 21 and 22, and between nucleoside positions 22 and 23 (counting from the 5′ end);
   [0363] wherein the two nucleosides at the 3′end of the antisense oligonucleotide are overhanging nucleosides, and the end of the oligomeric duplex constituting the 5′-end of the antisense oligonucleotide and the 3′-end of the sense oligonucleotide is blunt (i.e., neither oligonucleotide has overhang nucleoside at that end and instead the hybridizing region of the sense oligonucleotide includes the 3′-most nucleoside of the sense oligonucleotide and that nucleoside hybridizes with the 5′-most nucleoside of the antisense oligonucleotide).

[0364] In certain embodiments, the oligomeric duplexes described herein comprise:
[0365] (a) a sense oligonucleotide having:
   [0366] (i) a length of 21 nucleosides;
   [0367] (ii) a conjugate attached to the 3′-end or the 5′-end;
   [0368] (iii) 2′-F modifications at positions 1, 3, 5, 7, 9 to 11, 13, 17, 19, and 21, and 2′-OMe modifications at positions 2, 4, 6, 8, 12, 14, 16, 18, and 20 (counting from the 5′ end); and
   [0369] (iv) phosphorothioate internucleoside linkages between nucleoside positions 1 and 2, and between nucleoside positions 2 and 3 (counting from the 5′ end);
[0370] and
[0371] (b) an antisense oligonucleotide having:
   [0372] (i) a length of 23 nucleosides;
   [0373] (ii) 2′-OMe modifications at positions 1, 3, 5, 7, 9, 11 to 13, 15, 17, 19, and 21 to 23, and 2′-F modifications at positions 2, 4, 6, 8, 10, 14, 16, 18, and 20 (counting from the 5′ end); and
   [0374] (iii) phosphorothioate internucleoside linkages between nucleoside positions 1 and 2, between nucleoside positions 2 and 3, between nucleoside positions 21 and 22, and between nucleoside positions 22 and 23 (counting from the 5′ end);
   [0375] wherein the oligomeric duplex includes a two nucleoside overhang at the 3′end of the antisense oligonucleotide, and a blunt end at the 5′-end of the antisense oligonucleotide.

[0376] In certain embodiments, the oligomeric duplexes described herein comprise:
[0377] (a) a sense oligonucleotide having:
   [0378] (i) a length of 21 nucleosides;
   [0379] (ii) a conjugate attached to the 3′-end or the 5′-end;
   [0380] (iii) 2′-OMe modifications at positions 1 to 6, 8, 10, and 12 to 21, and 2′-F modifications at positions 7 and 9, and a deoxynucleoside at position 11 (counting from the 5′ end); and
   [0381] (iv) phosphorothioate internucleoside linkages between nucleoside positions 1 and 2, and between nucleoside positions 2 and 3 (counting from the 5′ end);
[0382] and
[0383] (b) an antisense oligonucleotide having:
   [0384] (i) a length of 23 nucleosides;
   [0385] (ii) 2′-OMe modifications at positions 1, 3, 7, 9, 11, 13, 15, 17, and 19 to 23, and 2′-F modifications at positions 2, 4 to 6, 8, 10, 12, 14, 16, and 18 (counting from the 5′ end); and
   [0386] (iii) phosphorothioate internucleoside linkages between nucleoside positions 1 and 2, between nucleoside positions 2 and 3, between nucleoside positions 21 and 22, and between nucleoside positions 22 and 23 (counting from the 5′ end);
   [0387] wherein the oligomeric duplex has a two nucleoside overhang at the 3′end of the antisense oligonucleotide, and a blunt end at the 5′-end of the antisense oligonucleotide.

[0388] In certain embodiments, the oligomeric duplexes described herein comprise:
[0389] (a) a sense oligonucleotide having:
   [0390] (i) a length of 21 nucleosides;
   [0391] (ii) a conjugate attached to the 3′-end or the 5′-end;
   [0392] (iii) 2′-F modifications at positions 1, 3, 5, 7, 9, 11, 13, 15, 17, 19, and 21, and 2′-OMe modifications at positions 2, 4, 6, 8, 10, 12, 14, 16, 18, and 20 (counting from the 5′ end); and
   [0393] (iv) phosphorothioate internucleoside linkages between nucleoside positions 1 and 2, between nucleoside positions 2 and 3, between nucleoside positions 19 and 20, and between nucleoside positions 20 and 21 (counting from the 5′ end);
[0394] and
[0395] (b) an antisense oligonucleotide having:
   [0396] (i) a length of 23 nucleosides;
   [0397] (ii) 2′-OMe modifications at positions 1, 3, 5, 7, 9, 11, 13, 15, 17, 19, and 21 to 23, and 2′-F modifications at positions 2, 4, 6, 8, 10, 12, 14, 16, 18, and 20 (counting from the 5′ end); and
   [0398] (iii) phosphorothioate internucleoside linkages between nucleoside positions 1 and 2, between nucleoside positions 2 and 3, between nucleoside positions 21 and 22, and between nucleoside positions 22 and 23 (counting from the 5′ end);
   [0399] wherein the oligomeric duplex has a two nucleoside overhang at the 3′end of the antisense oligonucleotide, and a blunt end at the 5′-end of the antisense oligonucleotide.

[0400] In certain embodiments, the oligomeric duplexes described herein comprise:
[0401] (a) a sense oligonucleotide having:
   [0402] (i) a length of 21 nucleosides;
   [0403] (ii) a conjugate attached to the 3′-end or the 5′-end;
   [0404] (iii) 2′-OMe modifications at positions 1 to 6, 8, and 12 to 21, and 2′-F modifications at positions 7, and 9 to 11; and
   [0405] (iv) phosphorothioate internucleoside linkages between nucleoside positions 1 and 2, and between nucleoside positions 2 and 3 (counting from the 5′ end);
[0406] and
[0407] (b) an antisense oligonucleotide having:
   [0408] (i) a length of 23 nucleosides;
   [0409] (ii) 2′-OMe modifications at positions 1, 3 to 5, 7, 8, 10 to 13, 15, and 17 to 23, and 2′-F modifications at positions 2, 6, 9, 14, and 16 (counting from the 5′ end); and
   [0410] (iii) phosphorothioate internucleoside linkages between nucleoside positions 1 and 2, between nucleoside positions 2 and 3, between nucleoside positions 21 and 22, and between nucleoside positions 22 and 23 (counting from the 5′ end);
   [0411] wherein the oligomeric duplex has a two nucleotide overhang at the 3′end of the antisense oligonucleotide, and a blunt end at the 5′-end of the antisense oligonucleotide.

[0412] In certain embodiments, the oligomeric duplexes described herein comprise:
[0413] (a) a sense oligonucleotide having:
   [0414] (i) a length of 21 nucleosides;
   [0415] (ii) a conjugate attached to the 3′-end or the 5′-end;
   [0416] (iii) 2′-OMe modifications at positions 1 to 6, 8, and 12 to 21, and 2′-F modifications at positions 7, and 9 to 11; and
   [0417] (iv) phosphorothioate internucleoside linkages between nucleoside positions 1 and 2, and between nucleoside positions 2 and 3 (counting from the 5′ end);
[0418] and
[0419] (b) an antisense oligonucleotide having:
   [0420] (i) a length of 23 nucleosides;
   [0421] (ii) 2′-OMe modifications at positions 1, 3 to 5, 7, 10 to 13, 15, and 17 to 23, and 2′-F modifications at positions 2, 6, 8, 9, 14, and 16 (counting from the 5′ end); and
   [0422] (iii) phosphorothioate internucleoside linkages between nucleoside positions 1 and 2, between nucleoside positions 2 and 3, between nucleotide positions 21 and 22, and between nucleoside positions 22 and 23 (counting from the 5′ end);
   [0423] wherein the oligomeric duplex has a two nucleoside overhang at the 3′end of the antisense oligonucleotide, and a blunt end at the 5′-end of the antisense oligonucleotide.

[0424] In certain embodiments, the oligomeric duplexes described herein comprise:
[0425] (a) a sense oligonucleotide having:
   [0426] (i) a length of 21 nucleosides;
   [0427] (ii) a conjugate attached to the 3′-end or the 5′-end;
   [0428] (iii) 2′-OMe modifications at positions 1 to 6, 8, and 12 to 21, and 2′-F modifications at positions 7, and 9 to 11 (counting from the 5′ end); and
   [0429] (iv) phosphorothioate internucleoside linkages between nucleoside positions 1 and 2, between nucleoside positions 2 and 3, between nucleoside positions 19 and 20, and between nucleoside positions 20 and 21; and
[0430] (b) an antisense oligonucleotide having:
   [0431] (i) a length of 23 nucleosides;
   [0432] (ii) 2′-OMe modifications at positions 1, 3 to 5, 7 to 13, 15, and 17 to 23, and 2′F modifications at positions 2, 6, 14, and 16 (counting from the 5′ end); and
   [0433] (iii) phosphorothioate internucleoside linkages between nucleoside positions 1 and 2, between nucleoside positions 2 and 3, between nucleoside positions 21 and 22, and between nucleoside positions 22 and 23 (counting from the 5′ end);
   [0434] wherein the oligomeric duplex includes a two nucleoside overhang at the 3′end of the antisense oligonucleotide, and a blunt end at the 5′-end of the antisense oligonucleotide. In certain embodiments, the oligomeric duplexes described herein comprise:
[0435] (a) a sense oligonucleotide having:
   [0436] (i) a length of 19 nucleosides;
   [0437] (ii) a conjugate attached to the 3′-end or the 5′-end;
   [0438] (iii) 2′-OMe modifications at positions 1 to 4, 6, and 10 to 19, and 2′-F modifications at positions 5, and 7 to 9; and
   [0439] (iv) phosphorothioate internucleoside linkages between nucleoside positions 1 and 2, and between nucleoside positions 2 and 3 (counting from the 5′ end);
[0440] and
[0441] (b) an antisense oligonucleotide having:
   [0442] (i) a length of 21 nucleosides;
   [0443] (ii) 2′-OMe modifications at positions 1, 3 to 5, 7, 10 to 13, 15, and 17 to 21, and 2′-F modifications at positions 2, 6, 8, 9, 14, and 16 (counting from the 5′ end); and
   [0444] (iii) phosphorothioate internucleoside linkages between nucleoside positions 1 and 2, between nucleoside positions 2 and 3, between nucleoside positions 19 and 20, and between nucleoside positions 20 and 21 (counting from the 5′ end);
   [0445] wherein the oligomeric duplex has a two nucleoside overhang at the 3′end of the antisense oligonucleotide, and a blunt end at the 5′-end of the antisense oligonucleotide.

[0446] In certain embodiments, the antisense oligonucleotide of the oligomeric duplex has a stabilized phosphate group at the 5′ end of thereof.

[0447] In certain embodiments, the oligomeric duplex comprises a sense oligonucleotide consisting of 21 nucleosides and an antisense oligonucleotide consisting of 23 nucleosides, wherein the sense oligonucleotide contains at least one motif of three contiguous 2′-F modified nucleosides at positions 9, 10, 11 from the 5′-end; the antisense oligonucleotide contains at least one motif of three 2′-O-methyl modifications on three consecutive nucleosides at positions 11, 12, 13 from the 5′ end, wherein one end of the oligomeric duplex is blunt, while the other end comprises a 2 nucleotide overhang. In certain embodiments, the 2 nucleotide overhang is at the 3′-end of the antisense oligonucleotide.

[0448] In certain embodiments, when the 2 nucleotide overhang is at the 3′-end of the antisense oligonucleotide, there may be two phosphorothioate internucleoside linkages between the terminal three nucleotides, wherein two of the three nucleotides are the overhang nucleotides, and the third nucleotide is a paired nucleotide next to the overhang nucleotide.

[0449] In certain embodiments, the oligomeric duplex additionally has two phosphorothioate internucleoside linkages between the terminal three nucleotides at both the 5′-end of the sense oligonucleotide and at the 5′-end of the antisense oligonucleotide. In certain embodiments, every nucleoside in the sense oligonucleotide and the antisense oligonucleotide of the oligomeric duplex is a modified nucleoside. In certain embodiments, each nucleoside is independently modified with a 2′-O-methyl or 2′-fluoro, e.g. in an alternating motif. Optionally, the oligomeric duplex comprises a conjugate.

[0450] In certain embodiments, every nucleotide in the sense oligonucleotide and antisense oligonucleotide of the oligomeric duplex, including the nucleotides that are part of the motifs, may be modified. Each nucleotide may be modified with the same or different modification, which can include one or more alteration of one or both of the non-linking phosphate oxygens; alteration of a constituent of the ribose sugar, e.g., of the 2′ hydroxyl on the ribose sugar; wholesale replacement of the phosphate moiety with “dephospho” linkers; modification or replacement of a naturally occurring base; and replacement or modification of the ribose-phosphate backbone.

[0451] In certain embodiments, each nucleoside of the sense oligonucleotide and antisense oligonucleotide is independently modified with LNA, cEt, UNA, HNA, CeNA, 2′-MOE, 2′-OMe, 2′-O-allyl, 2′-C-allyl, 2′-deoxy, 2′-hydroxyl, or 2′-fluoro. The oligomeric duplex can contain more than one modification. In one embodiment, each nucleoside of the sense oligonucleotide and antisense oligonucleotide is independently modified with 2′-O-methyl or 2′-F. In certain embodiments, the modification is a 2′-NMA modification.

[0452] The term “alternating motif” as used herein refers to a motif having one or more modifications, each modification occurring on alternating nucleosides of one oligonucleotide. The alternating nucleoside may refer to one per every other nucleoside or one per every three nucleosides, or a similar pattern. For example, if A, B and C each represent one type of modification to the nucleoside, the alternating motif can be “ABABABABABAB . . . ,” “AABBAABBAABB . . . ,” “AABAABAABAAB . . . ,” “AAABAAABAAAB . . . ,” “AAABBBAAABBB . . . ,” or “ABCABCABCABC . . . ,” etc.

[0453] The type of modifications contained in the alternating motif may be the same or different. For example, if A, B, C, D each represent one type of modification on the nucleoside, the alternating pattern, i.e., modifications on every other nucleoside, may be the same, but each of the sense oligonucleotide or antisense oligonucleotide can be selected from several possibilities of modifications within the alternating motif such as “ABABAB . . . ”, “ACACAC . . . ” “BDBDBD . . . ” or “CDCDCD . . . ,” etc.

[0454] In certain embodiments, the modification pattern for the alternating motif on the sense oligonucleotide relative to the modification pattern for the alternating motif on the antisense oligonucleotide is shifted. The shift may be such that the group of modified nucleotide of the sense oligonucleotide corresponds to a group of differently modified nucleotides of the antisense oligonucleotide and vice versa. For example, the sense oligonucleotide when paired with the antisense oligonucleotide in the oligomeric duplex, the alternating motif in the sense oligonucleotide may start with “ABABAB” from 5′-3′ of the oligonucleotide and the alternating motif in the antisense oligonucleotide may start with “BABABA” from 5′-3′ of the oligonucleotide within the duplex region. As another example, the alternating motif in the sense oligonucleotide may start with “AABBAABB” from 5′-3′ of the oligonucleotide and the alternating motif in the antisense oligonucleotide may start with “BBAABBAA” from 5′-3′ of the oligonucleotide within the duplex region, so that there is a complete or partial shift of the modification 10 patterns between the sense oligonucleotide and the antisense oligonucleotide.

[0455] In certain embodiments, the oligomeric duplex comprising the pattern of the alternating motif of 2′-O-methyl modification and 2′-F modification on the sense oligonucleotide initially has a shift relative to the pattern of the alternating motif of 2′-O-methyl modification and 2′-F modification on the antisense oligonucleotide initially, i.e., the 2′-O-methyl modified nucleotide on the sense oligonucleotide base pairs with a 2′-F modified nucleotides on the antisense oligonucleotide and vice versa. The 1 position of the sense oligonucleotide may start with the 2′-F modification, and the 1 position of the antisense oligonucleotide may start with a 2′-O-methyl modification.

[0456] The introduction of one or more motifs of three identical modifications on three consecutive nucleotides to the sense oligonucleotide and/or antisense oligonucleotide interrupts the initial modification pattern present in the sense oligonucleotide and/or antisense oligonucleotide. This interruption of the modification pattern of the sense and/or antisense oligonucleotide by introducing one or more motifs of three identical modifications on three consecutive nucleotides to the sense and/or antisense oligonucleotide surprisingly enhances the gene silencing activity to the target gene. In one embodiment, when the motif of three identical modifications on three consecutive 25 nucleotides is introduced to any of the oligonucleotides, the modification of the nucleotide next to the motif is a different modification than the modification of the motif. For example, the portion of the sequence containing the motif is “ . . . NaYYYNb . . . ,” where “Y” represents the modification of the motif of three identical modifications on three consecutive nucleotide, and “Na” and “Nb” represent a modification to the nucleotide next to the motif “YYY” that is different than the modification of Y, and where Na and Nb can be the same or different modifications. Alternatively, Na and/or Nb may be present or absent when there is a wing modification present.

[0457] In certain embodiments, the sense oligonucleotide may be represented by formula (I):

(I)
5′ nₚ-Nₐ-(XXX)i-N_{b}-YYY-N_{b}-(ZZZ)ᵣNₐ-n_{q} 3′

[0458] wherein:
[0459] i and j are each independently 0 or 1;
[0460] p and q are each independently 0-6;
[0461] each Nₐ independently represents 0-25 linked nucleosides comprising at least two differently modified nucleosides;
[0462] each N_{b} independently represents 0-10 linked nucleosides;
[0463] each nₚ and n_{q} independently represent an overhanging nucleoside;
[0464] wherein N_{b} and Y do not have the same modification; and
[0465] XXX, YYY and ZZZ each independently represent modified nucleosides where each X nucleoside has the same modification; each Y nucleoside has the same modification; and each Z nucleoside has the same modification. In certain embodiments, each Y comprises a 2′-F modification.

[0466] In certain embodiments, the Nₐ and N_{b} comprise modifications of alternating patterns.

[0467] In certain embodiments, the YYY motif occurs at or near the cleavage site of the target nucleic acid. For example, when the oligomeric duplex has a duplex region of 17-23 nucleotides in length, the YYY motif can occur at or near the vicinity of the cleavage site (e.g., can occur at positions 6, 7, 8; 7, 8, 9; 8, 9, 10; 9, 10, 11; 10, 11, 12; or 11, 12, 13) of the sense oligonucleotide, the count starting from the 1^{st} nucleotide from the 5′-end; or optionally, the count starting at the 1^{st} paired nucleotide within the duplex region, from the 5′-end.

[0468] In certain embodiments, the antisense oligonucleotide of the oligomeric duplex may be represented by the formula:

(II)
5′ n_{q}-Nₐ′-(Z′Z′Z′)ₖ-N_{b}′-Y′Y′Y′-N_{b}′-(X′X′X′)ₗ-N′ₐ-
nₚ 3′

[0469] wherein:
[0470] k and l are each independently 0 or 1;
[0471] p′ and q′ are each independently 0-6;
[0472] each Nₐ′ independently represents 0-25 linked nucleotides comprising at least two differently modified nucleotides;
[0473] each N_{b}′ independently represents 0-10 linked nucleotides;
[0474] each nₚ′ and n_{q}′ independently represent an overhanging nucleoside;
[0475] wherein N_{b}′ and Y′ do not have the same modification; and
[0476] X′X′X′, Y′Y′Y′ and Z′Z′Z′ each independently represent modified nucleosides where each X′ nucleoside has the same modification; each Y′ nucleoside has the same modification; and each Z′ nucleoside has the same modification. In certain embodiments, each Y′ comprises a 2′-F modification. In certain embodiments, each Y′ comprises a 2′-OMe modification.

[0477] In certain embodiments, the Nₐ′ and/or N_{b}′ comprise modifications of alternating patterns.

[0478] In certain embodiments, the Y′Y′Y′ motif occurs at or near the cleavage site of the target nucleic acid. For example, when the oligomeric duplex has a duplex region of 17-23 nucleotides in length, the Y′Y′Y′ motif can occur at positions 9, 10, 11; 10, 11, 12; 11, 12, 13; 12, 13, 14; or 13, 14, 15 of the antisense oligonucleotide, with the count starting from the 1 nucleotide from the 5′-end; or, optionally, the count starting at the 1^{st} paired nucleotide within the duplex region, from the 5′-end. Preferably, the Y′Y′Y′ motif occurs at positions 11, 12, 13.

[0479] In certain embodiments, k is 1 and l is 0, or k is 0 and l is 1, or both k and l are 1.

[0480] The antisense oligonucleotide can therefore be represented by the following formulas:

(IIb)
5′ n_{q}′-Nₐ′-Z′Z′Z′-N_{b}′-Y′Y′Y′-Nₐ′-nₚ′ 3′;
(IIc)
5′ n_{q}′-Nₐ′-Y′Y′Y′-N_{b}′-X′X′X′-nₚ′ 3′;
or
(IId)
5′ n_{q}′-Nₐ′-Z′Z′Z′-N_{b}′-Y′Y′Y′-N_{b}′-X′X′X′-Nₐ′-nₚ′ 3′.

[0481] When the antisense oligonucleotide is represented by formula IIb, N_{b}′ represents 0-10, 0-7, 0-5, 0-4, 0-2, or 0 linked nucleosides. Each Nₐ′ independently represents 2-20, 2-15, or 2-10 linked nucleosides.

[0482] When the antisense oligonucleotide is represented by formula IIc, N_{b}′ represents 0-10, 0-7, 0-5, 0-4, 0-2, or 0 linked nucleosides. Each Nₐ′ independently represents 2-20, 2-15, or 2-10 linked nucleosides.

[0483] When the antisense oligonucleotide is represented by formula IId, N_{b}′ represents 0-10, 0-7, 0-5, 0-4, 0-2, or 0 linked nucleosides. Each Nₐ′ independently represents 2-20, 2-15, or 2-10 linked nucleosides. Preferably, N_{b}′ is 0, 1, 2, 3, 4, 5, or 6.

[0484] In certain embodiments, k is 0 and l is 0 and the antisense oligonucleotide may be represented by the formula:

(Ia)
5′ nₚ′-Na′-Y′Y′Y′-Nₐ′-n_{q}′ 3′.

[0485] When the antisense oligonucleotide is represented by formula IIa, each Nₐ′ independently represents 2-20, 2-15, or 2-10 linked nucleosides.

[0486] Each X′, Y′, and Z′ may be the same or different from each other.

[0487] Each nucleoside of the sense oligonucleotide and antisense oligonucleotide may be independently modified with LNA, UNA, cEt, HNA, CeNA, 2′-methoxyethyl, 2′-O-methyl, 2′-O-allyl, 2′-C-allyl, 2′-hydroxyl, or 2′-fluoro. For example, each nucleoside of the sense oligonucleotide and antisense oligonucleotide is independently modified with, 2′-O-methyl or 2′-fluoro. Each X, Y, Z, X′, Y′, and Z′, in particular, may represent a 2′-O-methyl modification or 2′-fluoro modification. In certain embodiments, the modification is a 2′-NMA modification.

[0488] In certain embodiments, the sense oligonucleotide of the oligomeric duplex may contain YYY motif occurring at 9, 10, and 11 positions of the oligonucleotide when the duplex region is 21 nucleotides, the count starting from the 1^{st} nucleotide from the 5′-end, or optionally, the count starting at the 1^{st} paired nucleotide within the duplex region, from the 5′-end; and Y represents 2′-F modification. The sense oligonucleotide may additionally contain XXX motif or ZZZ motifs as wing modifications at the opposite end of the duplex region; and XXX and ZZZ each independently represents a 2′-O-methyl modification or 2′-fluoro modification.

[0489] In certain embodiments, the antisense oligonucleotide may contain Y′Y′Y′ motif occurring at positions 11, 12, 13 of the oligonucleotide, the count starting from the 1^{st} nucleotide from the 5′-end, or optionally, the count starting at the 1^{st} paired nucleotide within the duplex region, from the 5′-end; and Y′ represents 2′-O-methyl modification. The antisense oligonucleotide may additionally contain X′X′X′ motif or Z′Z′Z′ motif as wing modifications at the opposite end of the duplex region; and X′X′X′ or Z′Z′Z′ each independently represents a 2′-O-methyl modification or 2′-fluoro modification.

[0490] The sense oligonucleotide represented by any one of the above formulas Ia, Ib, Ic, and Id forms a duplex with an antisense oligonucleotide being represented by any one of the formulas IIa, IIb, IIc, and IId, respectively.

[0491] Accordingly, the oligomeric duplexes described herein may comprise a sense oligonucleotide and an antisense oligonucleotide, each oligonucleotide having 14 to 30 nucleotides, the oligomeric duplex represented by formula (ITT):

Sense:
5′ nₚ-Nₐ-(XXX)ᵢ-N_{b}-YYY-N_{b}-(ZZZ)ⱼ-Nₐ-n_{q} 3′
Antisense:
3′ nₚ′-Nₐ′-(X′X′X′)ₖ-N_{b}′-Y′Y′Y′-N_{b}′-(Z′Z′Z′)ₗ-Nₐ′-
n_{q}′ 5′

[0492] wherein:
[0493] i, j, k, and l are each independently 0 or 1;
[0494] p, p′, q, and q′ are each independently 0-6;
[0495] each Nₐ and Nₐ′ independently represents 0-25 linked nucleosides, each sequence comprising at least two differently modified nucleotides;
[0496] each N_{b} and N_{b}′ independently represents 0-10 linked nucleosides;
[0497] wherein each nₚ′, nₚ, n_{q}′ and n_{q}, each of which may or may not be present, independently represents an overhang nucleotide; and
[0498] XXX, YYY, X′X′X′, Y′Y′Y′, and Z′Z′Z′ each independently represent one motif of three identical modifications on three consecutive nucleotides.

[0499] In certain embodiments, i is 0 and j is 0; or i is 1 and j is 0; or i is 0 and j is 1; or both i and j are 0; or both i and j are 1. In another embodiment, k is 0 and l is 0; or k is 1 and l is 0, or k is 0 and l is 1; or both k and l are 0; or both k and 1 are 1.

[0500] Exemplary combinations of the sense oligonucleotide and antisense oligonucleotide forming a oligomeric duplex include the formulas below:

(IIIa)
5′ nₚ-Nₐ-YYY-Nₐ-n_{q} 3′
3′ nₚ′-Nₐ′-Y′Y′Y′-Nₐ′n_{q}′ 5′
(IIIb)
5′ nₚ-Nₐ-YYY-N_{b}-ZZZ-Nₐ-n_{q} 3′
3′ nₚ′-Nₐ′-Y′Y′Y′-N_{b}′-Z′Z′Z′-Nₐ′n_{q}′ 5′
(IIIc)
5′ nₚ-Nₐ-XXX-N_{b}-YYY-Nₐ-n_{q} 3′
3′ nₚ′-Nₐ′-X′X′X′-N_{b}′-Y′Y′Y′-Nₐ′-n_{q}′ 5′
(IIId)
5′ nₚ-Nₐ-XXX-N_{b}-YYY-N_{b}-ZZZ-Nₐ-n_{q} 3′
3′ nₚ′-Nₐ′-X′X′X′-N_{b}′-Y′Y′Y′-N_{b}′-Z′Z′Z′-Nₐ-n_{q}′ 5′

[0501] When the oligomeric duplex is represented with formula IIIa, each Nₐ independently represents 2-20, 2-15, or 2-10 linked nucleosides.

[0502] When the oligomeric duplex is represented with formula IIIb, each N_{b} independently represents 1-10, 1-7, 1-5, or 1-4 linked nucleosides. Each Nₐ independently represents 2-20, 2-15, or 2-10 linked nucleosides.

[0503] When the oligomeric duplex is represented with formula IIIc, each N_{b}, N_{b}′ independently represents 0-10, 0-7, 0-10, 0-7, 0-5, 0-4, 0-2, or 0 linked nucleosides. Each Nₐ independently represents 2-20, 2-15, or 2-10 linked nucleosides.

[0504] When the oligomeric duplex is represented with formula IIId, each N_{b}, N_{b}′ independently represents 0-10, 0-7, 0-10, 0-7, 0-5, 0-4, 0-2, or 0 linked nucleosides. Each Nₐ, Nₐ′ independently 2-20, 2-15, or 2-10 linked nucleosides. Each Nₐ, Nₐ′, N_{b}, N_{b}′ independently comprises modifications of alternating pattern.

[0505] Each of X, Y, and Z in formulas III, IIIa, IIIb, IIIc, and IIId may be the same or different from each other.

[0506] When the oligomeric duplex is represented by formula III, IIIa, IIIb, IIIc, and/or IIId, at least one of the Y nucleotides may form a base pair with one of the Y′ nucleotides. Alternatively, at least two of the Y nucleotides may form base pairs with the corresponding Y′ nucleotides; or all three of the Y nucleotides may form base pairs with the corresponding Y′ nucleotides.

[0507] When the oligomeric duplex is represented by formula IIIb or IIId, at least one of the Z nucleotides may form a base pair with one of the Z′ nucleotides. Alternatively, at least two of the Z nucleotides may form base pairs with the corresponding Z′ nucleotides; or all three of the Z nucleotides may form base pairs with the corresponding Z′ nucleotides.

[0508] When the oligomeric duplex is represented by formula IIIc or IIId, at least one of the X nucleotides may form a base pair with one of the X′ nucleotides. Alternatively, at least two of the X nucleotides may form base pairs with the corresponding X′ nucleotides; or all three of the X nucleotides may form base pairs with the corresponding X′ nucleotides.

[0509] In certain embodiments, the modification of the Y nucleotide is different than the modification on the Y′ nucleotide, the modification on the Z nucleotide is different than the modification on the Z′ nucleotide, and/or the modification on the X nucleotide is different than the modification on the X′ nucleotide.

[0510] In certain embodiments, when the oligomeric duplex is represented by the formula IIId, the Nₐ modifications are 2′-O-methyl or 2′-fluoro modifications. In another embodiment, when the oligomeric duplex is represented by formula IIId, the Nₐ modifications are 2′-O-methyl or 2′-fluoro modifications and nₚ′>0 and at least one nₚ′ is linked to a neighboring nucleotide via phosphorothioate linkage. In other embodiments, when the oligomeric duplex is represented by formula IIId, the Nₐ modifications are 2′-O-methyl or 2′-fluoro modifications, nₚ′>0 and at least one nₚ′ is linked to a neighboring nucleotide via phosphorothioate linkage, and the sense oligonucleotide is conjugated to one or more cell targeting group attached through a bivalent or trivalent branched linker. In certain embodiments, when the oligomeric duplex is represented by formula IIId, the Nₐ modifications are 2′-O-methyl or 2′-fluoro modifications, nₚ′>0 and at least one nₚ′ is linked to a neighboring nucleotide via phosphorothioate linkage, the sense oligonucleotide comprises at least one phosphorothioate linkage and the sense oligonucleotide is conjugated to one or more cell targeting group attached through a bivalent or trivalent branched linker.

[0511] In certain embodiments, when the oligomeric duplex is represented by the formula IIIa, the Nₐ modifications are 2′-O-methyl or 2′-fluoro modifications and nₚ′>0 and at least one nₚ′ is linked to a neighboring nucleotide via phosphorothioate linkage, the sense oligonucleotide comprises at least one phosphorothioate linkage and the sense oligonucleotide is conjugated to one or more cell targeting group attached through a bivalent or trivalent branched linker.

[0512] In certain embodiments, the modification is a 2′-NMA modification.

### Antisense Activity

[0513] In certain embodiments, oligomeric compounds and oligomeric duplexes are capable of hybridizing to a target nucleic acid, resulting in at least one antisense activity; such oligomeric compounds and oligomeric duplexes are antisense agents. In certain antisense activities, an antisense agent or a portion of an antisense agent is loaded into an RNA-induced silencing complex (RISC), ultimately resulting in cleavage of the target nucleic acid. For example, certain antisense compounds result in cleavage of the target nucleic acid by Argonaute. Antisense agents having antisense oligonucleotides that are loaded into RISC are RNAi agents. RNAi agents may be double-stranded (siRNA or dsRNAi) or single-stranded (ssRNA).

[0514] In certain embodiments, RNAi agents are capable of RISC-mediated modulation of a target nucleic acid in a cell. In certain embodiments, such compounds reduce or inhibit the amount or activity of a target nucleic acid by 25% or more in the standard in vitro assay described in Example 2. In certain embodiments, RNAi agents selectively affect more than one target nucleic acid. Such RNAi agents comprise a nucleobase sequence that hybridizes to more than one target nucleic acid, resulting in more than one desired antisense activity. In certain embodiments, an RNAi agent does not hybridize to one or more non-target nucleic acid or does not hybridize to one or more non-target nucleic acid in such a way that results in significant undesired antisense activity.

[0515] Antisense activities may be observed directly or indirectly. In certain embodiments, observation or detection of an RNAi activity involves observation or detection of a change in an amount of a target nucleic acid or protein encoded by such target nucleic acid, a change in the ratio of splice variants of a nucleic acid or protein and/or a phenotypic change in a cell or animal.

### Certain Target Nucleic Acids

[0516] RNAi agents comprise or consist of an antisense oligonucleotide comprising a region that is complementary to a target nucleic acid. In certain embodiments, the target nucleic acid is an endogenous RNA molecule. In certain embodiments, the target nucleic acid encodes a protein.

### A. Target/Duplex Complementarity

[0517] In certain embodiments, oligomeric agents or oligomeric compounds comprise or consist of an antisense oligonucleotide comprising a region that is complementary to a target nucleic acid. In certain embodiments, antisense oligonucleotides are 99%, 95%, 90%, 85%, or 80% complementary to the target nucleic acid. In certain embodiments, antisense oligonucleotides are at least 80% complementary to the target nucleic acid over the entire length of the antisense oligonucleotides and comprise a region that is 100% or fully complementary to a target nucleic acid. In certain embodiments, the region of full complementarity is from 6 to 20, 10 to 18, or 18 to 20 nucleobases in length.

[0518] In certain embodiments, antisense oligonucleotides comprise one or more mismatched nucleobases relative to the target nucleic acid. In certain embodiments, antisense activity against the target is reduced by such mismatch, but activity against a non-target is reduced by a greater amount. Thus, in certain embodiments selectivity of the antisense oligonucleotides is improved.

[0519] In certain embodiments, antisense oligonucleotides comprise a region complementary to the target nucleic acid. In certain embodiments, the complementary region comprises or consists of at least 8, at least 9, at least 10, at least 11, at least 12, at least 13, at least 14, at least 15, at least 16, at least 17, at least 18, at least 19, at least 20, at least 21, at least 22, at least 23, at least 24 or at least 25 contiguous nucleosides. In certain embodiments, the complementary region constitutes 70%, 80%, 85%, 90%, 95% of the nucleosides of the antisense oligonucleotide. In certain embodiments, the complementary region constitutes all of the nucleosides of the antisense oligonucleotide. In certain embodiments, the complementary region of the antisense oligonucleotide is at least 99%, 95%, 90%, 85%, or 80% complementary to the target nucleic acid. In certain embodiments, the complementary region of the antisense oligonucleotide is 100% complementary to the target nucleic acid.

[0520] In certain embodiments, oligomeric duplexes comprise a sense oligonucleotide. In such embodiments, sense oligonucleotides comprise a region complementary to the antisense oligonucleotide. In certain embodiments, the complementary region comprises or consists of at least 8, at least 9, at least 10, at least 11, at least 12, at least 13, at least 14, at least 15, at least 16, at least 17, at least 18, at least 19, at least 20, at least 21, at least 22, at least 23, at least 24 or at least 25 contiguous nucleotides. In certain embodiments, the complementary region constitutes 70%, 80%, 85%, 90%, 95% of the nucleosides of the sense oligonucleotide. In certain embodiments, the complementary region constitutes all of the nucleosides of the sense oligonucleotide. In certain embodiments, the complementary region of the sense oligonucleotide is at least 99%, 95%, 90%, 85%, or 80% complementary to the antisense oligonucleotide. In certain embodiments, the complementary region of the sense oligonucleotide is 100% complementary to the antisense oligonucleotide.

[0521] The complementary region of a sense oligonucleotide hybridizes with the antisense oligonucleotide to form a duplex region. In certain embodiments, such duplex region consists of 7 hybridized pairs of nucleosides (one of each pair being on the antisense oligonucleotide and the other of each pair being on the sense oligonucleotide). In certain embodiments, a duplex region comprises least 8, at least 9, at least 10, at least 11, at least 12, at least 13, at least 14, at least 15, at least 16, at least 17, at least 18, at least 19, at least 20, at least 21, at least 22, at least 23, at least 24 or at least 25 hybridized pairs. In certain embodiments, each nucleoside of antisense oligonucleotide is paired in the duplex region (i.e., the antisense oligonucleotide has no overhanging nucleosides). In certain embodiments, the antisense oligonucleotide includes unpaired nucleosides at the 3′-end and/or the 5′end (overhanging nucleosides). In certain embodiments, each nucleoside of sense oligonucleotide is paired in the duplex region (i.e., the sense oligonucleotide has no overhanging nucleosides). In certain embodiments, the sense oligonucleotide includes unpaired nucleosides at the 3′-end and/or the 5′end (overhanging nucleosides). In certain embodiments, duplexes formed by the antisense oligonucleotide and the sense oligonucleotide do not include any overhangs at one or both ends. Such ends without overhangs are referred to as blunt. In certain embodiments wherein the antisense oligonucleotide has overhanging nucleosides, one or more of those overhanging nucleosides are complementary to the target nucleic acid. In certain embodiments wherein the antisense oligonucleotide has overhanging nucleosides, one or more of those overhanging nucleosides are not complementary to the target nucleic acid.

### B. Tau

[0522] In certain embodiments, RNAi agents comprise or consist of an antisense oligonucleotide comprising a region that is complementary to a target nucleic acid, wherein the target nucleic acid is tau RNA. In each of the embodiments described above, the RNAi agent may target tau RNA. In certain embodiments, the RNAi agent is an oligomeric duplex.

[0523] In certain embodiments, the tau nucleic acid has the sequence set forth in SEQ ID NO: 1 (GENBANK Accession No. NM_001377265.1) or SEQ ID NO:2 (GENBANK Accession No. NT_010783.14 truncated from nucleotides 2624000 to 2761000). In certain embodiments, contacting a cell with an oligomeric duplex comprising an oligomeric compound complementary to SEQ ID NO: 1 reduces the amount of tau RNA, and in certain embodiments reduces the amount of tau protein. In certain embodiments, contacting a cell with an oligomeric duplex comprising an oligomeric compound complementary to SEQ ID NO: 1 results in reduced aggregation of tau protein.

[0524] In certain embodiments, contacting a cell in an animal with an RNAi agent comprising an oligonucleotide complementary to SEQ ID NO: 1 ameliorates one or more symptoms of a neurodegenerative disease. In certain embodiments, the symptom is loss of memory, loss of motor function, or increase in the number and/or volume of neurofibrillary inclusions. In certain embodiments, contacting a cell in an animal with RNAi agent comprising an oligonucleotide complementary to SEQ ID NO: 1 results in maintaining or improving memory, maintaining or improving motor function, and/or maintenance or reduction in the number and/or volume of neurofibrillary inclusions.

[0525] In certain embodiments, the RNAi agent consists of an antisense oligonucleotide. In certain embodiments, the RNAi agent comprises a conjugate group. In certain embodiments, the RNAi agent is an oligomeric duplex comprising an antisense RNA oligomeric compound and a sense RNAi oligomeric compound. In certain embodiments, the oligomeric duplex comprises more than one conjugate group.

### C. Certain Target Nucleic Acids in Certain Tissues

[0526] In certain embodiments, oligomeric compounds comprise or consist of an antisense oligonucleotide comprising a region that is complementary to a target nucleic acid, wherein the target nucleic acid is expressed in a pharmacologically relevant tissue. In certain embodiments, oligomeric duplexes comprise an antisense oligonucleotide comprising a region that is complementary to a target nucleic acid, wherein the target nucleic acid is expressed in a pharmacologically relevant tissue. In certain embodiments, the pharmacologically relevant tissues are the cells and tissues that comprise the central nervous system (CNS). Such tissues include the cortex, spinal cord, and the hippocampus.

### D. Certain Methods and Uses

[0527] Certain embodiments provided herein relate to methods of inhibiting tau RNA expression or activity, which can be useful for treating or ameliorating a tau-associated disease. In certain embodiments, the tau-associated disease is a tauopathy, Alzheimer's disease, fronto-temporal dementia (FTD), FTDP-17, progressive supranuclear palsy (PSP), chronic traumatic encephalopathy (CTE), corticobasal ganglionic degeneration (CBD), epilepsy, or Dravet's Syndrome.

[0528] In certain embodiments, a method comprises administering to a subject an oligomeric compound, or an oligomeric duplex, any of which having a nucleobase sequence complementary to tau RNA. In certain embodiments, the subject has or is at risk for developing a tau-associated disease. In certain embodiments, the subject has or is at risk for developing a tauopathy, Alzheimer's disease, fronto-temporal dementia (FTD), FTDP-17, progressive supranuclear palsy (PSP), chronic traumatic encephalopathy (CTE), corticobasal ganglionic degeneration (CBD), epilepsy, or Dravet's Syndrome. In certain embodiments, the oligomeric compound or oligomeric duplex is an antisense agent. In certain embodiments, the subject has or is at risk for developing Alzheimer's disease.

[0529] In certain embodiments, a method of treating a tau-associated disease comprises administering to a subject an oligomeric compound, an oligomeric duplex, or an antisense agent, any of which having a nucleobase sequence complementary to tau RNA. In certain embodiments, the subject has or is at risk for developing a tauopathy, Alzheimer's disease, fronto-temporal dementia (FTD), FTDP-17, progressive supranuclear palsy (PSP), chronic traumatic encephalopathy (CTE), corticobasal ganglionic degeneration (CBD), epilepsy, or Dravet's Syndrome. In certain embodiments, the oligomeric compound or oligomeric duplex is an antisense agent. In certain embodiments, the subject has or is at risk for developing Alzheimer's disease. In certain embodiments, the oligomeric compound or oligomeric duplex is an antisense agent. In certain embodiments, the at least one symptom or hallmark is loss of memory, loss of motor function, and increase in the number and/or volume of neurofibrillary inclusions. In certain embodiments, administration of the oligomeric compound, the oligomeric duplex, or the antisense agent to the subject reduces or delays the onset or progression of loss of memory, loss of motor function, and increase in the number and/or volume of neurofibrillary inclusions.

[0530] In certain embodiments, a method of reducing expression of tau in a cell comprises contacting the cell with an oligomeric compound, an oligomeric duplex, or an antisense agent, any of which having a nucleobase sequence complementary to tau RNA. In certain embodiments, the cell is central nervous system cell. In certain embodiments, the cell is a human cell.

[0531] Certain embodiments are drawn to an oligomeric compound, an oligomeric duplex, or an antisense agent, any of which having a nucleobase sequence complementary to tau RNA, for use in treating a tau-associated disease associated or for use in the manufacture of a medicament for treating a tau-associated disease. In certain embodiments, the tau-associated disease is a tauopathy, Alzheimer's disease, fronto-temporal dementia (FTD), FTDP-17, progressive supranuclear palsy (PSP), chronic traumatic encephalopathy (CTE), corticobasal ganglionic degeneration (CBD), epilepsy, or Dravet's Syndrome. In certain embodiments, the tau-associated disease is Alzheimer's Disease.

[0532] In any of the methods or uses described herein, the oligomeric compound, the oligomeric duplex, or the antisense agent can be any described herein.

### E. Certain Pharmaceutical Compositions

[0533] The oligomeric compounds, oligomeric duplexes, or antisense agents described herein may be admixed with pharmaceutically acceptable active or inert substances for the preparation of pharmaceutical compositions or formulations. Compositions and methods for the formulation of pharmaceutical compositions are dependent upon a number of criteria, including, but not limited to, route of administration, extent of disease, or dose to be administered. In certain embodiments, the oligomeric compound or oligomeric duplex is an RNAi agent.

[0534] Certain embodiments provide pharmaceutical compositions comprising one or more oligomeric compounds, oligomeric duplexes, or antisense agents, or a salt thereof. In certain such embodiments, the pharmaceutical composition comprises a suitable pharmaceutically acceptable diluent or carrier. In certain embodiments, a pharmaceutical composition comprises a sterile saline solution and one or more oligomeric compounds, oligomeric duplexes, or antisense agents. In certain embodiments, such pharmaceutical composition consists of a sterile saline solution and one or more oligomeric compounds, oligomeric duplexes, or antisense agents. In certain embodiments, the sterile saline is pharmaceutical grade saline. In certain embodiments, a pharmaceutical composition comprises one or more oligomeric compounds, oligomeric duplexes, or antisense agents and sterile water. In certain embodiments, a pharmaceutical composition consists of one oligomeric compound, oligomeric duplex, antisense agent and sterile water. In certain embodiments, the sterile water is pharmaceutical grade water. In certain embodiments, a pharmaceutical composition comprises one or more oligomeric compounds, oligomeric duplexes, or antisense agents and phosphate-buffered saline (PBS). In certain embodiments, a pharmaceutical composition consists of one or more oligomeric compounds, oligomeric duplexes, or antisense agents and sterile PBS. In certain embodiments, the sterile PBS is pharmaceutical grade PBS. In certain embodiments, such pharmaceutical composition consists of cerebrospinal fluid (CSF) and one or more oligomeric compounds, oligomeric duplexes, or antisense agents. In certain embodiments, the oligomeric duplexes or antisense agents comprises a sense oligonucleotide and an antisense oligonucleotide. Compositions and methods for the formulation of pharmaceutical compositions are dependent upon a number of criteria, including, but not limited to, route of administration, extent of disease, or dose to be administered.

[0535] In certain embodiments, the CSF is artificial CSF (aCSF). In certain embodiments, a pharmaceutical composition consists of one or more oligomeric compounds, oligomeric duplexes, or antisense agents and artificial cerebrospinal fluid. In certain embodiments, a pharmaceutical composition consists essentially of one or more oligomeric compounds, oligomeric duplexes, or antisense agents and artificial cerebrospinal fluid. In certain embodiments, the artificial cerebrospinal fluid is pharmaceutical grade.

[0536] In certain embodiments, aCSF comprises sodium chloride, potassium chloride, sodium dihydrogen phosphate dihydrate, sodium phosphate dibasic anhydrous, calcium chloride dihydrate, and magnesium chloride hexahydrate. In certain embodiments, the pH of an aCSF solution is modulated with a suitable pH-adjusting agent, for example, with acids such as hydrochloric acid and alkalis such as sodium hydroxide, to a range of from about 7.1-7.3, or to about 7.2.

[0537] In certain embodiments, pharmaceutical compositions comprise one or more oligomeric compounds, oligomeric duplexes, or antisense agents, and one or more excipients. In certain embodiments, excipients are selected from water, salt solutions, alcohol, polyethylene glycols, gelatin, lactose, amylase, magnesium stearate, talc, silicic acid, viscous paraffin, hydroxymethylcellulose and polyvinylpyrrolidone.

[0538] In certain embodiments, oligomeric compounds, oligomeric duplexes, or antisense agents may be admixed with pharmaceutically acceptable active and/or inert substances for the preparation of pharmaceutical compositions or formulations. Compositions and methods for the formulation of pharmaceutical compositions depend on a number of criteria, including, but not limited to, route of administration, extent of disease, or dose to be administered.

[0539] Pharmaceutical compositions comprising one or more oligomeric compounds, oligomeric duplexes, or antisense agents provided herein encompass any pharmaceutically acceptable salts, esters, or salts of such esters, which, upon administration to an animal, including a human, is capable of providing (directly or indirectly) the biologically active metabolite or residue thereof. Accordingly, for example, the disclosure is also drawn to pharmaceutically acceptable salts of compounds, prodrugs, pharmaceutically acceptable salts of such prodrugs, and other bioequivalents. In certain embodiments, pharmaceutically acceptable salts comprise inorganic salts, such as monovalent or divalent inorganic salts. Suitable pharmaceutically acceptable salts include, but are not limited to, sodium, potassium, calcium, and magnesium salts.

[0540] A prodrug can include the incorporation of additional nucleosides at one or both ends of oligomeric compound, oligomeric duplex, or antisense agent, which are cleaved by endogenous nucleases within the body, to form the active compound.

[0541] In certain embodiments, pharmaceutical compositions comprise a delivery system. Examples of delivery systems include, but are not limited to, liposomes and emulsions. Certain delivery systems are useful for preparing certain pharmaceutical compositions including those comprising hydrophobic compounds. In certain embodiments, certain organic solvents such as dimethylsulfoxide are used.

[0542] In certain embodiments, pharmaceutical compositions comprise one or more tissue-specific delivery molecules designed to deliver the one or more pharmaceutical agents comprising an oligomeric compound, an oligomeric duplex, or an antisense agent provided herein to specific tissues or cell types. For example, in certain embodiments, pharmaceutical compositions include liposomes coated with a tissue-specific antibody.

[0543] In certain embodiments, pharmaceutical compositions comprise a co-solvent system. Certain of such co-solvent systems comprise, for example, benzyl alcohol, a nonpolar surfactant, a water-miscible organic polymer, and an aqueous phase. In certain embodiments, such co-solvent systems are used for hydrophobic compounds. A non-limiting example of such a co-solvent system is the VPD co-solvent system, which is a solution of absolute ethanol comprising 3% w/v benzyl alcohol, 8% w/v of the nonpolar surfactant Polysorbate 80™ and 65% w/v polyethylene glycol 300. The proportions of such co-solvent systems may be varied considerably without significantly altering their solubility and toxicity characteristics. Furthermore, the identity of co-solvent components may be varied: for example, other surfactants may be used instead of Polysorbate 80™; the fraction size of polyethylene glycol may be varied; other biocompatible polymers may replace polyethylene glycol, e.g., polyvinyl pyrrolidone; and other sugars or polysaccharides may substitute for dextrose.

[0544] In certain embodiments, pharmaceutical compositions are prepared for oral administration. In certain embodiments, pharmaceutical compositions are prepared for buccal administration. In certain embodiments, a pharmaceutical composition is prepared for administration by injection (e.g., intravenous, subcutaneous, intramuscular, intrathecal (IT), intracerebroventricular (ICV), etc.). In certain embodiments, a pharmaceutical composition comprises a carrier and is formulated in aqueous solution, such as water or physiologically compatible buffers such as Hanks's solution, Ringer's solution, or physiological saline buffer. In certain embodiments, other ingredients are included (e.g., ingredients that aid in solubility or serve as preservatives). In certain embodiments, injectable suspensions are prepared using appropriate liquid carriers, suspending agents and the like. Certain pharmaceutical compositions for injection are presented in unit dosage form, e.g., in ampoules or in multi-dose containers. Certain pharmaceutical compositions for injection are suspensions, solutions or emulsions in oily or aqueous vehicles, and may contain formulatory agents such as suspending, stabilizing and/or dispersing agents. Certain solvents suitable for use in pharmaceutical compositions for injection include, but are not limited to, lipophilic solvents and fatty oils, such as sesame oil, synthetic fatty acid esters, such as ethyl oleate or triglycerides, and liposomes.

[0545] In certain embodiments, oligomeric compounds, oligomeric duplexes, or antisense agents are in aqueous solution with sodium. In certain embodiments, oligomeric compounds, oligomeric duplexes, or antisense agents are in aqueous solution with potassium. In certain embodiments, oligomeric compounds, oligomeric duplexes, or antisense agents are in PBS. In certain embodiments, oligomeric compounds, oligomeric duplexes, or antisense agents are in water. In certain embodiments, oligomeric compounds, oligomeric duplexes, or antisense agents are in aCSF. In certain such embodiments, the pH of the solution is adjusted with NaOH and/or HCl to achieve a desired pH.

### Certain Hotspot Regions

### 1. Nucleobases 1754-1783 of SEQ ID NO: 1

[0546] In certain embodiments, nucleobases 1754-1783 of SEQ ID NO: 1 comprise a hotspot region. In certain embodiments, oligomeric duplexes comprise antisense oligonucleotides complementary to a portion of nucleobases 1754-1783 of SEQ ID NO: 1. The antisense oligonucleotides are 15 to 30 nucleobases in length. In certain embodiments, the antisense oligonucleotides are 17 to 30, 18 to 30, 18 to 25, or 20 to 23 nucleobases in length. In certain embodiments, the antisense oligonucleotides are 23 nucleobases in length.

[0547] The nucleobase sequences of SEQ ID NOs: 1115, 1116, 850, and 721 are complementary to a portion of nucleobases 1754-1783 of SEQ ID NO: 1. The nucleobase sequences of Compound Nos: 1702622, 1702625, 1703582, and 1613217 are complementary to a portion of nucleobases 1754-1783 of SEQ ID NO: 1.

[0548] In certain embodiments, oligomeric duplexes comprising antisense oligonucleotides complementary to a portion of nucleobases 1754-1783 of SEQ ID NO: 1 achieve at least 43% reduction of MAPT RNA in a standard in vitro assay. In certain embodiments, oligomeric duplexes comprising antisense oligonucleotides complementary to a portion of nucleobases 1754-1783 of SEQ ID NO: 1 achieve an average of 69% reduction of MAPT RNA in a standard in vitro assay.

[0549] In certain embodiments, the antisense oligonucleotide has an internucleoside linkage motif of 5′-ssooooooooooooooooooss-3′, wherein each “s” is a phosphorothioate internucleoside linkage and each “o” is a phosphodiester internucleoside linkage. In certain embodiments, the antisense oligonucleotide has a sugar motif of 5′-yfyfyfyfyfyfyfyfyfyfyyy-3′, wherein each “y” represents a 2′-OMe sugar moiety, and each “f” represents a 2′-F sugar moiety. In certain embodiments, the antisense oligonucleotide has a sugar motif of 5′-yfyyyfyyyyyyyfyfyyyyyyy-3′, wherein each “y” represents a 2′-OMe sugar moiety, and each “f” represents a 2′-F sugar moiety.

### 2. Nucleobases 2332-2362 of SEQ ID NO: 1

[0550] In certain embodiments, nucleobases 2332-2362 of SEQ ID NO: 1 comprise a hotspot region. In certain embodiments, oligomeric duplexes comprise antisense oligonucleotides complementary to a portion of nucleobases 2332-2362 of SEQ ID NO: 1. The antisense oligonucleotides are 15 to 30 nucleobases in length. In certain embodiments, the antisense oligonucleotides are 17 to 30, 18 to 30, 18 to 25, or 20 to 23 nucleobases in length. In certain embodiments, the antisense oligonucleotides are 23 nucleobases in length.

[0551] The nucleobase sequences of SEQ ID NOs: 855, 1142, and 1360 are complementary to a portion of nucleobases 2332-2362 of SEQ ID NO: 1. The nucleobase sequences of Compound Nos: 1703618, 1702718, and 1703621 are complementary to a portion of nucleobases 2332-2362 of SEQ ID NO: 1.

[0552] In certain embodiments, oligomeric duplexes comprising antisense oligonucleotides complementary to a portion of nucleobases 2332-2362 of SEQ ID NO: 1 achieve at least 47% reduction of MAPT RNA in a standard in vitro assay. In certain embodiments, oligomeric duplexes comprising antisense oligonucleotides complementary to a portion of nucleobases 2332-2362 of SEQ ID NO: 1 achieve an average of 64% reduction of MAPT RNA in a standard in vitro assay.

[0553] In certain embodiments, the antisense oligonucleotide has an internucleoside linkage motif of 5′-ssooooooooooooooooooss-3′, wherein each “s” is a phosphorothioate internucleoside linkage and each “o” is a phosphodiester internucleoside linkage. In certain embodiments, the antisense oligonucleotide has a sugar motif of 5′-yfyyyfyyyyyyyfyfyyyyyyy-3′, wherein each “y” represents a 2′-OMe sugar moiety, and each “f” represents a 2′-F sugar moiety.

### 3. Nucleobases 110-142 of SEQ ID NO: 1

[0554] In certain embodiments, nucleobases 110-142 of SEQ ID NO: 1 comprise a hotspot region. In certain embodiments, oligomeric duplexes comprise antisense oligonucleotides complementary to a portion of nucleobases 110-142 of SEQ ID NO: 1. The antisense oligonucleotides are 15 to 30 nucleobases in length. In certain embodiments, the antisense oligonucleotides are 17 to 30, 18 to 30, 18 to 25, or 20 to 23 nucleobases in length. In certain embodiments, the antisense oligonucleotides are 23 nucleobases in length.

[0555] The nucleobase sequences of SEQ ID NOs: 1360, 329, and 1045 are complementary to a portion of nucleobases 110-142 of SEQ ID NO: 1. The nucleobase sequences of Compound Nos: 1612977, 1702343, and 1703531 are complementary to a portion of nucleobases 110-142 of SEQ ID NO: 1.

[0556] In certain embodiments, oligomeric duplexes comprising antisense oligonucleotides complementary to a portion of nucleobases 110-142 of SEQ ID NO: 1 achieve at least 48% reduction of MAPT RNA in a standard in vitro assay. In certain embodiments, oligomeric duplexes comprising antisense oligonucleotides complementary to a portion of nucleobases 110-142 of SEQ ID NO: 1 achieve an average of 63% reduction of MAPT RNA in a standard in vitro assay.

[0557] In certain embodiments, the antisense oligonucleotide has an internucleoside linkage motif of 5′-ssooooooooooooooooooss-3′, wherein each “s” is a phosphorothioate internucleoside linkage and each “o” is a phosphodiester internucleoside linkage. In certain embodiments, the antisense oligonucleotide has a sugar motif of 5′-yfyfyfyfyfyfyfyfyfyfyyy-3′, wherein each “y” represents a 2′-OMe sugar moiety, and each “f” represents a 2′-F sugar moiety. In certain embodiments, the antisense oligonucleotide has a sugar motif of 5′-yfyyyfyyyyyyyfyfyyyyyyy-3′, wherein each “y” represents a 2′-OMe sugar moiety, and each “f” represents a 2′-F sugar moiety.

### 4. Nucleobases 6523-6552 of SEQ ID NO: 1

[0558] In certain embodiments, nucleobases 6523-6552 of SEQ ID NO: 1 comprise a hotspot region. In certain embodiments, oligomeric duplexes comprise antisense oligonucleotides complementary to a portion of nucleobases 6523-6552 of SEQ ID NO: 1. The antisense oligonucleotides are 15 to 30 nucleobases in length. In certain embodiments, the antisense oligonucleotides are 17 to 30, 18 to 30, 18 to 25, or 20 to 23 nucleobases in length. In certain embodiments, the antisense oligonucleotides are 23 nucleobases in length.

[0559] The nucleobase sequences of SEQ ID NOs: 890, 1330, and 1431 are complementary to a portion of nucleobases 6523-6552 of SEQ ID NO: 1. The nucleobase sequences of Compound Nos: 1703939, 1703471, and 1703942 are complementary to a portion of nucleobases 6523-6552 of SEQ ID NO: 1.

[0560] In certain embodiments, oligomeric duplexes comprising antisense oligonucleotides complementary to a portion of nucleobases 6523-6552 of SEQ ID NO: 1 achieve at least 44% reduction of MAPT RNA in a standard in vitro assay. In certain embodiments, oligomeric duplexes comprising antisense oligonucleotides complementary to a portion of nucleobases 6523-6552 of SEQ ID NO: 1 achieve an average of 60% reduction of MAPT RNA in a standard in vitro assay.

[0561] In certain embodiments, the antisense oligonucleotide has an internucleoside linkage motif of 5′-ssooooooooooooooooooss-3′, wherein each “s” is a phosphorothioate internucleoside linkage and each “o” is a phosphodiester internucleoside linkage. In certain embodiments, the antisense oligonucleotide has a sugar motif of 5′-yfyyyfyyyyyyyfyfyyyyyyy-3′, wherein each “y” represents a 2′-OMe sugar moiety, and each “f” represents a 2′-F sugar moiety.

### NONLIMITING DISCLOSURE AND INCORPORATION BY REFERENCE

[0562] Each of the literature and patent publications listed herein is incorporated by reference in its entirety.

[0563] While certain compounds, compositions and methods described herein have been described with specificity in accordance with certain embodiments, the following examples serve only to illustrate the compounds described herein and are not intended to limit the same. Each of the references, GenBank accession numbers, and the like recited in the present application is incorporated herein by reference in its entirety.

[0564] Although the sequence listing accompanying this filing identifies each sequence as either “RNA” or “DNA” as required, in reality, those sequences may be modified with any combination of chemical modifications. One of skill in the art will readily appreciate that such designation as “RNA” or “DNA” to describe modified oligonucleotides is, in certain instances, arbitrary. For example, an oligonucleotide comprising a nucleoside comprising a 2′-OH sugar moiety and a thymine base could be described as a DNA having a modified sugar (2′-OH in place of one 2′-H of DNA) or as an RNA having a modified base (thymine (methylated uracil) in place of an uracil of RNA). Accordingly, nucleic acid sequences provided herein, including, but not limited to those in the sequence listing, are intended to encompass nucleic acids containing any combination of natural or modified RNA and/or DNA, unless otherwise stated, including, but not limited to such nucleic acids having modified nucleobases. By way of further example and without limitation, an oligomeric compound having the nucleobase sequence “ATCGATCG” encompasses any compounds having such nucleobase sequence, whether modified or unmodified, including, but not limited to, such compounds comprising RNA bases, such as those having sequence “AUCGAUCG” and those having some DNA bases and some RNA bases such as “AUCGATCG” and compounds having other modified nucleobases, such as “AT^{m}CGAUCG,” wherein ^{m}C indicates a cytosine base comprising a methyl group at the 5-position. Finally, for clarity, unless otherwise indicated, the phrase “nucleobase sequence of SEQ ID NO: X”, refers only to the sequence of nucleobases in that SEQ ID NO: X, independent of any sugar or internucleoside linkage modifications also described in such SEQ ID NO.

[0565] Certain compounds described herein (e.g., modified oligonucleotides) have one or more asymmetric center and thus give rise to enantiomers, diastereomers, and other stereoisomeric configurations that may be defined, in terms of absolute stereochemistry, as (R) or (S), as α or β such as for sugar anomers, or as (D) or (L), such as for amino acids, etc. Compounds provided herein that are drawn or described as having certain stereoisomeric configurations include only the indicated compounds. Compounds provided herein that are drawn or described with undefined stereochemistry include all such possible isomers, including their stereorandom and optically pure forms, unless specified otherwise. Likewise, tautomeric forms of the compounds herein are also included unless otherwise indicated. Unless otherwise indicated, compounds described herein are intended to include corresponding salt forms.

[0566] The compounds described herein include variations in which one or more atoms are replaced with a non-radioactive isotope or radioactive isotope of the indicated element. For example, compounds herein that comprise hydrogen atoms encompass all possible deuterium substitutions for each of the ¹H hydrogen atoms. Isotopic substitutions encompassed by the compounds herein include but are not limited to: ²H or ³H in place of ¹H, ¹³C or ¹⁴C in place of ¹²C, ¹⁵N in place of ¹⁴N, ¹⁷O or ¹⁸O in place of ¹⁶O, and ³³S, ³⁴S, ³⁵S, or ³⁶S in place of ³²S. In certain embodiments, non-radioactive isotopic substitutions may impart new properties on the oligomeric compound that are beneficial for use as a therapeutic or research tool. In certain embodiments, radioactive isotopic substitutions may make the compound suitable for research or diagnostic purposes such as imaging.

### Examples

[0567] The following examples illustrate certain embodiments of the present disclosure and are not limiting. Moreover, where specific embodiments are provided, the inventors have contemplated generic application of those specific embodiments. For example, disclosure of an oligonucleotide having a particular motif provides reasonable support for additional oligonucleotides having the same or similar motif. And, for example, where a particular high-affinity modification appears at a particular position, other high-affinity modifications at the same position are considered suitable, unless otherwise indicated.

### Example 1: Design of RNAi Compounds with Antisense RNAi Oligonucleotides Complementary to a Human MAPT Nucleic Acid

[0568] RNAi compounds comprising antisense RNAi oligonucleotides complementary to a human MAPT nucleic acid and sense RNAi oligonucleotides complementary to the antisense RNAi oligonucleotides were designed as follows.

[0569] The RNAi compounds in the tables below consist of an antisense RNAi oligonucleotide and a sense RNAi oligonucleotide. In each case, the antisense RNAi oligonucleotide is 23 nucleosides in length; has a sugar motif (from 5′ to 3′) of: yfyfyfyfyfyfyfyfyfyfyyy, wherein each “y” represents a 2′-O-methylribosyl sugar, and each “f” represents a 2′-fluororibosyl sugar; and has an internucleoside linkage motif (from 5′ to 3′) of: ssooooooooooooooooooss, wherein each “o” represents a phosphodiester internucleoside linkage, and each “s” represents a phosphorothioate internucleoside linkage. The sense RNAi oligonucleotide in each case is 21 nucleosides in length; has a sugar motif (from 5′ to 3′) of: fyfyfyfyfyfyfyfyfyfyf, wherein each “y” represents a 2′-O-methylribosyl sugar, and each “f” represents a 2′-fluororibosyl sugar; and has an internucleoside linkage motif (from 5′ to 3′) of: ssooooooooooooooooss, wherein each “o” represents a phosphodiester internucleoside linkage, and each “s” represents a phosphorothioate internucleoside linkage. Each antisense RNAi oligonucleotide is complementary to the target nucleic acid (MAPT), and each sense RNAi oligonucleotide is complementary to the first 21 nucleosides of the antisense RNAi oligonucleotide (from 5′ to 3′) wherein the last two 3′-nucleosides of the antisense RNAi oligonucleotides are not paired with the sense RNAi oligonucleotide (are overhanging nucleosides).

[0570] “Start site” indicates the 5′-most nucleoside to which the antisense RNAi oligonucleotide is complementary target nucleic acid sequence. “Stop site” indicates the 3′-most nucleoside to which the antisense RNAi oligonucleotide is complementary in the target nucleic acid sequence. Each antisense RNAi oligonucleotide listed in the tables below is 100% complementary to SEQ ID NO: 1 (GENBANK Accession No. NM_001377265.1).

TABLE 1
RNAi compounds targeting human MAPT, SEQ ID NO: 1

| | | | | SEQ ID | SEQ ID | | | |
|---|---|---|---|---|---|---|---|---|
| | | | | NO: 1 | NO: 1 | | | |
| | Anti- | Antisense | SEQ | Antisense | Antisense | | Sense | SEQ |
| Compound | sense | Sequence | ID | Start | Stop | Sense | Sequence | ID |
| Number | ID | (5′ to 3′) | NO. | Site | Site | ID | (5′ to 3′) | NO. |
| 1613942 | 1613940 | UAAAGUGAGUCA | 11 | 5929 | 5951 | 1613941 | UCAAGCUGCUG | 40 |
| | | GCAGCUUGAAG | | | | | ACUCACUUUA | |
| 1613945 | 1613943 | AAAUGGAACUAU | 12 | 5944 | 5966 | 1613944 | ACUUUAUCAAU | 41 |
| | | UGAUAAAGUGA | | | | | AGUUCCAUUU | |
| 1613951 | 1613949 | AGGAUACAGUCU | 13 | 5974 | 5996 | 1613950 | UCAGUGGUGAG | 42 |
| | | CACCACUGAAG | | | | | ACUGUAUCCU | |
| 1613963 | 1613961 | UCUUACACAUUC | 14 | 6025 | 6047 | 1613962 | AGGGGGGAGGA | 43 |
| | | CUCCCCCCUCC | | | | | AUGUGUAAGA | |
| 1613966 | 1613964 | UGCCCAUGUUAA | 15 | 6040 | 6062 | 1613965 | GUAAGAUAGUU | 44 |
| | | CUAUCUUACAC | | | | | AACAUGGGCA | |
| 1613975 | 1613973 | AAGGGUUACGAG | 16 | 6085 | 6107 | 1613974 | UUAAACUGCCU | 45 |
| | | GCAGUUUAAGU | | | | | CGUAACCCUU | |
| 1613987 | 1613985 | AAACCCCAAGGG | 17 | 6151 | 6173 | 1613986 | AGUUAGAGGCC | 46 |
| | | CCUCUAACUCC | | | | | CUUGGGGUUU | |
| 1613996 | 1613994 | UGAACUAGCCAG | 18 | 6194 | 6216 | 1613995 | CCCAGGCAGCUG | 47 |
| | | CUGCCUGGGAA | | | | | GCUAGUUCA | |
| 1613999 | 1613997 | UGGCUGGGGAGG | 19 | 6209 | 6231 | 1613998 | AGUUCAUUCCC | 48 |
| | | GAAUGAACUAG | | | | | UCCCCAGCCA | |
| 1614005 | 1614003 | UAUUCCUACGCC | 20 | 6227 | 6249 | 1614004 | CCAGGUGCAGG | 49 |
| | | UGCACCUGGCU | | | | | CGUAGGAAUA | |
| 1614020 | 1614018 | UAGGGAGGCAUG | 21 | 6295 | 6317 | 1614019 | GCCCACAAUCAU | 50 |
| | | AUUGUGGGCUU | | | | | GCCUCCCUA | |
| 1614023 | 1614021 | AGGAUGCCAAGG | 22 | 6310 | 6332 | 1614022 | UCCCUAAGACCU | 51 |
| | | UCUUAGGGAGG | | | | | UGGCAUCCU | |
| 1614026 | 1614024 | AACGGCUUAGAG | 23 | 6325 | 6347 | 1614025 | CAUCCUUCCCUC | 52 |
| | | GGAAGGAUGCC | | | | | UAAGCCGUU | |
| 1614032 | 1614030 | AGUGUGAGAGGU | 24 | 6351 | 6373 | 1614031 | CUCUGUGCCACC | 53 |
| | | GGCACAGAGGU | | | | | UCUCACACU | |
| 1614035 | 1614033 | UGUGUGUCUGGA | 25 | 6366 | 6388 | 1614034 | CACACUGGCUCC | 54 |
| | | GCCAGUGUGAG | | | | | AGACACACA | |
| 1614038 | 1614036 | UCCAAAAGCACA | 26 | 6381 | 6403 | 1614037 | CACACAGCCUGU | 55 |
| | | GGCUGUGUGUC | | | | | GCUUUUGGA | |
| 1614077 | 1614065 | UACUUGGAGAAC | 27 | 6426 | 6448 | 1614066 | CUCAUCUUUGU | 56 |
| | | AAAGAUGAGGA | | | | | UCUCCAAGUA | |
| 1614131 | 1614121 | AUGGGACACGCA | 28 | 6475 | 6497 | 1614122 | GUGAUCACCUG | 57 |
| | | GGUGAUCACCU | | | | | CGUGUCCCAU | |
| 1614140 | 1614138 | AAGCUGAAGAGA | 29 | 6520 | 6542 | 1614139 | CUUCUGAUUUC | 58 |
| | | AAUCAGAAGUU | | | | | UCUUCAGCUU | |
| 1614149 | 1614147 | UUAGGAGGUGAG | 30 | 6565 | 6587 | 1614148 | GCCUAGAGCCUC | 59 |
| | | GCUCUAGGCCA | | | | | ACCUCCUAA | |
| 1614152 | 1614150 | AUGGGGCUAAGU | 31 | 6580 | 6602 | 1614151 | UCCUAAUAGAC | 60 |
| | | CUAUUAGGAGG | | | | | UUAGCCCCAU | |
| 1614158 | 1614156 | AGAAAUAGUCCU | 32 | 6610 | 6632 | 1614157 | AUGUUGAGCAG | 61 |
| | | GCUCAACAUGG | | | | | GACUAUUUCU | |
| 1614164 | 1614162 | ACCGAAGAAAUC | 33 | 6640 | 6662 | 1614163 | AAGUCCCAUGA | 62 |
| | | AUGGGACUUGC | | | | | UUUCUUCGGU | |
| 1614173 | 1614171 | UGAUUUCAUGUC | 34 | 6673 | 6695 | 1614172 | GGGGGGAGGGA | 63 |
| | | CCUCCCCCCAC | | | | | CAUGAAAUCA | |
| 1614176 | 1614174 | AAAGCUAAGCUA | 35 | 6688 | 6710 | 1614175 | AAAUCAUCUUA | 64 |
| | | AGAUGAUUUCA | | | | | GCUUAGCUUU | |
| 1614182 | 1614180 | ACAAUACACUAU | 36 | 6718 | 6740 | 1614181 | AAUGUCUAUAU | 65 |
| | | AUAGACAUUCA | | | | | AGUGUAUUGU | |
| 1614188 | 1614186 | ACAGUCAGUGUA | 37 | 6748 | 6770 | 1614187 | CAAAUGAUUUA | 66 |
| | | AAUCAUUUGUU | | | | | CACUGACUGU | |
| 1614191 | 1614189 | UUCACUUUUACA | 38 | 6763 | 6785 | 1614190 | GACUGUUGCUG | 67 |
| | | GCAACAGUCAG | | | | | UAAAAGUGAA | |
| 1614194 | 1614192 | AACUUUAUUUCC | 39 | 6778 | 6800 | 1614193 | AGUGAAUUUGG | 68 |
| | | AAAUUCACUUU | | | | | AAAUAAAGUU | |

TABLE 2
RNAi compounds targeting human MAPT, SEQ ID NO: 1

| | | | | SEQ ID | SEQ ID | | | |
|---|---|---|---|---|---|---|---|---|
| | | | | NO: 1 | NO: 1 | | | |
| | Anti- | Antisense | SEQ | Antisense | Antisense | | Sense | SEQ |
| Compound | sense | Sequence | ID | Start | Stop | Sense | Sequence | ID |
| Number | ID | (5′ to 3′) | NO. | Site | Site | ID | (5′ to 3′) | NO. |
| 1613699 | 1613697 | AAACCUCUUUAC | 69 | 4601 | 4623 | 1613698 | GAAAUGCUUGU | 113 |
| | | AAGCAUUUCAA | | | | | AAAGAGGUUU | |
| 1613705 | 1613703 | AGACACCUCGUG | 70 | 4625 | 4647 | 1613704 | ACCCACCCUCAC | 114 |
| | | AGGGUGGGUUA | | | | | GAGGUGUCU | |
| 1613708 | 1613706 | UCAAAACUUGGG | 71 | 4692 | 4714 | 1613707 | CUGGGGCCUCCC | 115 |
| | | AGGCCCCAGCA | | | | | AAGUUUUGA | |
| 1613714 | 1613712 | UUGGGUCCCAGG | 72 | 4720 | 4742 | 1613713 | UCCUCAGCACCU | 116 |
| | | UGCUGAGGAAA | | | | | GGGACCCAA | |
| 1613717 | 1613715 | AGAAGCUGGUCU | 73 | 4735 | 4757 | 1613716 | ACCCAACAGAG | 117 |
| | | CUGUUGGGUCC | | | | | ACCAGCUUCU | |
| 1613726 | 1613724 | UGCUUCAGGCCU | 74 | 4778 | 4800 | 1613725 | CUGUGACGAAG | 118 |
| | | UCGUCACAGCU | | | | | GCCUGAAGCA | |
| 1613729 | 1613727 | UCAGUCCUAAUC | 75 | 4793 | 4815 | 1613728 | GAAGCACAGGA | 119 |
| | | CUGUGCUUCAG | | | | | UUAGGACUGA | |
| 1613735 | 1613733 | AGGGGAAGUAGG | 76 | 4823 | 4845 | 1613734 | GUCCCCUUCCCU | 120 |
| | | GAAGGGGACAU | | | | | ACUUCCCCU | |
| 1613738 | 1613736 | AAGGGGAAGUAG | 77 | 4824 | 4846 | 1613737 | UCCCCUUCCCUA | 121 |
| | | GGAAGGGGACA | | | | | CUUCCCCUU | |
| 1613741 | 1613739 | UAGUCUGUGCCC | 78 | 4852 | 4874 | 1613740 | CCUGUGUCAGG | 122 |
| | | UGACACAGGGA | | | | | GCACAGACUA | |
| 1613744 | 1613742 | ACCAGCCACAAG | 79 | 4867 | 4889 | 1613743 | AGACUAGGUCU | 123 |
| | | ACCUAGUCUGU | | | | | UGUGGCUGGU | |
| 1613747 | 1613745 | AAGCCAGACCAG | 80 | 4874 | 4896 | 1613746 | GUCUUGUGGCU | 124 |
| | | CCACAAGACCU | | | | | GGUCUGGCUU | |
| 1613750 | 1613748 | UGACCAGAGAGA | 81 | 4902 | 4924 | 1613749 | GAGGAUGGUUC | 125 |
| | | ACCAUCCUCGC | | | | | UCUCUGGUCA | |
| 1613753 | 1613751 | UGAGACUUCGGG | 82 | 4917 | 4939 | 1613752 | UGGUCAUAGCC | 126 |
| | | CUAUGACCAGA | | | | | CGAAGUCUCA | |
| 1613759 | 1613757 | AGGAGUUGUAAG | 83 | 4947 | 4969 | 1613758 | CAAAGGAGGCU | 127 |
| | | CCUCCUUUGGG | | | | | UACAACUCCU | |
| 1613762 | 1613760 | UUUUUCUUGUGA | 84 | 4962 | 4984 | 1613761 | ACUCCUGCAUCA | 128 |
| | | UGCAGGAGUUG | | | | | CAAGAAAAA | |
| 1613771 | 1613769 | UUGGAGAGGAAC | 85 | 5046 | 5068 | 1613770 | UCAGACUGGGU | 129 |
| | | CCAGUCUGAGG | | | | | UCCUCUCCAA | |
| 1613777 | 1613775 | UCAUCCCAAUCCC | 86 | 5115 | 5137 | 1613776 | CCACAGCAGGG | 130 |
| | | UGCUGUGGUC | | | | | AUUGGGAUGA | |
| 1613780 | 1613778 | UCCAGGACAGGC | 87 | 5130 | 5152 | 1613779 | GGAUGAAUUGC | 131 |
| | | AAUUCAUCCCA | | | | | CUGUCCUGGA | |
| 1613789 | 1613787 | AUCCUUCCUCAG | 88 | 5169 | 5191 | 1613788 | GCUGCCUGCCUG | 132 |
| | | GCAGGCAGCUU | | | | | AGGAAGGAU | |
| 1613795 | 1613793 | UGGGAACAGUGU | 89 | 5199 | 5221 | 1613794 | AGUCAGGAGAC | 133 |
| | | CUCCUGACUUG | | | | | ACUGUUCCCA | |
| 1613804 | 1613802 | UUUGUGCAAGGU | 90 | 5241 | 5263 | 1613803 | AGCCCGCUGACC | 134 |
| | | CAGCGGGCUGA | | | | | UUGCACAAA | |
| 1613807 | 1613805 | UGGCAGCAGAUG | 91 | 5256 | 5278 | 1613806 | CACAAACUCCAU | 135 |
| | | GAGUUUGUGCA | | | | | CUGCUGCCA | |
| 1613813 | 1613811 | UGUUUUGCAAAG | 92 | 5286 | 5308 | 1613812 | GGAAGCCGCCU | 136 |
| | | GCGGCUUCCCU | | | | | UUGCAAAACA | |
| 1613816 | 1613814 | UUCUUUAGGCAG | 93 | 5301 | 5323 | 1613815 | AAAACAUUGCU | 137 |
| | | CAAUGUUUUGC | | | | | GCCUAAAGAA | |
| 1613822 | 1613820 | AGAAUUGGGCCU | 94 | 5326 | 5348 | 1613821 | AGCAGCCUCAG | 138 |
| | | GAGGCUGCUGA | | | | | GCCCAAUUCU | |
| 1613831 | 1613829 | AAGUCCCUCAGG | 95 | 5371 | 5393 | 1613830 | AAAGGCAACCC | 139 |
| | | GUUGCCUUUAA | | | | | UGAGGGACUU | |
| 1613834 | 1613832 | UGGAUUUCUACU | 96 | 5386 | 5408 | 1613833 | GGACUUGGCAG | 140 |
| | | GCCAAGUCCCU | | | | | UAGAAAUCCA | |
| 1613837 | 1613835 | AGGGGAGGCCCU | 97 | 5397 | 5419 | 1613836 | UAGAAAUCCAG | 141 |
| | | GGAUUUCUACU | | | | | GGCCUCCCCU | |
| 1613840 | 1613838 | UCUAGCUGCACA | 98 | 5425 | 5447 | 1613839 | GCAGCUUCGUG | 142 |
| | | CGAAGCUGCCA | | | | | UGCAGCUAGA | |
| 1613846 | 1613844 | UGGGCCCAGAGA | 99 | 5455 | 5477 | 1613845 | GAAAGGAAGUC | 143 |
| | | CUUCCUUUCAG | | | | | UCUGGGCCCA | |
| 1613855 | 1613853 | AGGGAGGCUCUU | 100 | 5479 | 5501 | 1613854 | CUCUCCACCAAG | 144 |
| | | GGUGGAGAGUU | | | | | AGCCUCCCU | |
| 1613858 | 1613856 | AAUUGCUGGGAC | 101 | 5503 | 5525 | 1613857 | GUUCGCUGAGU | 145 |
| | | UCAGCGAACGG | | | | | CCCAGCAAUU | |
| 1613864 | 1613862 | UCUCCUUCUCAG | 102 | 5533 | 5555 | 1613863 | UGAAGGGAUCU | 146 |
| | | AUCCCUUCAAC | | | | | GAGAAGGAGA | |
| 1613867 | 1613865 | UACCCCACAUUU | 103 | 5548 | 5570 | 1613866 | AGGAGAAGGAA | 147 |
| | | CCUUCUCCUUC | | | | | AUGUGGGGUA | |
| 1613870 | 1613868 | AACCACCACCAA | 104 | 5563 | 5585 | 1613869 | GGGGUAGAUUU | 148 |
| | | AUCUACCCCAC | | | | | GGUGGUGGUU | |
| 1613876 | 1613874 | UGUUGGCAGUAA | 105 | 5593 | 5615 | 1613875 | CCCCCCUCAUUA | 149 |
| | | UGAGGGGGGCA | | | | | CUGCCAACA | |
| 1613879 | 1613877 | AAAUGCAGCCGA | 106 | 5608 | 5630 | 1613878 | CCAACAGUUUC | 150 |
| | | AACUGUUGGCA | | | | | GGCUGCAUUU | |
| 1613897 | 1613895 | AGCAGGGCACAA | 107 | 5653 | 5675 | 1613896 | CUGAAGUUCUU | 151 |
| | | GAACUUCAGGA | | | | | GUGCCCUGCU | |
| 1613900 | 1613898 | AUGGUGCUGAAG | 108 | 5665 | 5687 | 1613899 | UGCCCUGCUCUU | 152 |
| | | AGCAGGGCACA | | | | | CAGCACCAU | |
| 1613912 | 1613910 | UGAUCUUAGGCU | 109 | 5736 | 5758 | 1613911 | CUUGGGGCCAG | 153 |
| | | GGCCCCAAGAG | | | | | CCUAAGAUCA | |
| 1613918 | 1613916 | UUAUCUGCCAGC | 110 | 5766 | 5788 | 1613917 | GUGAUCAGUGC | 154 |
| | | ACUGAUCACCC | | | | | UGGCAGAUAA | |
| 1613924 | 1613922 | UAAGAUCACAAG | 111 | 5796 | 5818 | 1613923 | GCACGCUGGCU | 155 |
| | | CCAGCGUGCCU | | | | | UGUGAUCUUA | |
| 1613933 | 1613931 | AUCUAGCCCACCC | 112 | 5884 | 5906 | 1613932 | GUGUCCUUGGG | 156 |
| | | AAGGACACUG | | | | | UGGGCUAGAU | |

TABLE 3
RNAi compounds targeting human MAPT, SEQ ID NO: 1

| | | | | SEQ ID | SEQ ID | | | |
|---|---|---|---|---|---|---|---|---|
| | | | | NO: 1 | NO: 1 | | | |
| | Anti- | Antisense | SEQ | Antisense | Antisense | | Sense | SEQ |
| Compound | sense | Sequence | ID | Start | Stop | Sense | Sequence | ID |
| Number | ID | (5′ to 3′) | NO. | Site | Site | ID | (5′ to 3′) | NO. |
| 1613468 | 1613466 | UCACACUCACAC | 157 | 3135 | 3157 | 1613467 | GUCAACCUUGUG | 205 |
| | | AAGGUUGACAU | | | | | UGAGUGUGA | |
| 1613474 | 1613472 | UCUUGUGCUUCC | 158 | 3211 | 3233 | 1613473 | GAGGGGAGAGGA | 206 |
| | | UCUCCCCUCUG | | | | | AGCACAAGA | |
| 1613477 | 1613475 | UCUCCCACUCCC | 159 | 3226 | 3248 | 1613476 | ACAAGAAGUGGG | 207 |
| | | ACUUCUUGUGC | | | | | AGUGGGAGA | |
| 1613483 | 1613481 | UACUCUCCAGCA | 160 | 3248 | 3270 | 1613482 | GAAGCCACGUGC | 208 |
| | | CGUGGCUUCCU | | | | | UGGAGAGUA | |
| 1613486 | 1613484 | AAGGAGGGGGAU | 161 | 3263 | 3285 | 1613485 | AGAGUAGACAUC | 209 |
| | | GUCUACUCUCC | | | | | CCCCUCCUU | |
| 1613492 | 1613490 | UUUACCCGCUGU | 162 | 3403 | 3425 | 1613491 | GGAGAAGGGACA | 210 |
| | | CCCUUCUCCCA | | | | | GCGGGUAAA | |
| 1613495 | 1613493 | AGCUUGCCUUCU | 163 | 3418 | 3440 | 1613494 | GGUAAAAAGAGA | 211 |
| | | CUUUUUACCCG | | | | | AGGCAAGCU | |
| 1613501 | 1613499 | AGGAGGUCAUCC | 164 | 3451 | 3473 | 1613500 | GCACUUCGUGGA | 212 |
| | | ACGAAGUGCCA | | | | | UGACCUCCU | |
| 1613510 | 1613508 | AAGAGGCCAGCG | 165 | 3493 | 3515 | 1613509 | UCUUGAGAGCGC | 213 |
| | | CUCUCAAGACA | | | | | UGGCCUCUU | |
| 1613513 | 1613511 | UUUCUGUGGAGC | 166 | 3552 | 3574 | 1613512 | CUUCCCUCUGCU | 214 |
| | | AGAGGGAAGCC | | | | | CCACAGAAA | |
| 1613519 | 1613517 | UUCCAACCUUCA | 167 | 3582 | 3604 | 1613518 | AUUGAGUUCUGA | 215 |
| | | GAACUCAAUAA | | | | | AGGUUGGAA | |
| 1613522 | 1613520 | AAAUCAUGGCAG | 168 | 3597 | 3619 | 1613521 | UUGGAACUGCUG | 216 |
| | | CAGUUCCAACC | | | | | CCAUGAUUU | |
| 1613525 | 1613523 | UCUGCAAAGUGG | 169 | 3612 | 3634 | 1613524 | UGAUUUUGGCCA | 217 |
| | | CCAAAAUCAUG | | | | | CUUUGCAGA | |
| 1613531 | 1613529 | AAGAGAACUGGU | 170 | 3642 | 3664 | 1613530 | UUAGGGCUAACC | 218 |
| | | UAGCCCUAAAG | | | | | AGUUCUCUU | |
| 1613540 | 1613538 | AAACGGGUGGAC | 171 | 3681 | 3703 | 1613539 | UUGGGAGACGUC | 219 |
| | | GUCUCCCAAGA | | | | | CACCCGUUU | |
| 1613543 | 1613541 | ACACACUCCAGA | 172 | 3715 | 3737 | 1613542 | ACUGGCAUCUCU | 220 |
| | | GAUGCCAGUGG | | | | | GGAGUGUGU | |
| 1613546 | 1613544 | AGACCCCCACAC | 173 | 3723 | 3745 | 1613545 | CUCUGGAGUGUG | 221 |
| | | ACUCCAGAGAU | | | | | UGGGGGUCU | |
| 1613549 | 1613547 | UCUCACGGCAGA | 174 | 3808 | 3830 | 1613548 | GUGCUGUUGUCU | 222 |
| | | CAACAGCACAG | | | | | GCCGUGAGA | |
| 1613552 | 1613550 | AGUGAUUGGGCU | 175 | 3819 | 3841 | 1613551 | UGCCGUGAGAGC | 223 |
| | | CUCACGGCAGA | | | | | CCAAUCACU | |
| 1613555 | 1613553 | AUGAGGGGUAUA | 176 | 3834 | 3856 | 1613554 | AUCACUGCCUAU | 224 |
| | | GGCAGUGAUUG | | | | | ACCCCUCAU | |
| 1613558 | 1613556 | ACAUUGUGACGU | 177 | 3849 | 3871 | 1613557 | CCUCAUCACACG | 225 |
| | | GUGAUGAGGGG | | | | | UCACAAUGU | |
| 1613564 | 1613562 | AAGGGGUGGUGA | 178 | 3876 | 3898 | 1613563 | UUCCCAGCCUCA | 226 |
| | | GGCUGGGAAUU | | | | | CCACCCCUU | |
| 1613567 | 1613565 | AGGGUCAUUACU | 179 | 3891 | 3913 | 1613566 | CCCCUUCUCAGU | 227 |
| | | GAGAAGGGGUG | | | | | AAUGACCCU | |
| 1613576 | 1613574 | UUAAUUUCACCC | 180 | 3936 | 3958 | 1613575 | CCAUACUGAGGG | 228 |
| | | UCAGUAUGGAG | | | | | UGAAAUUAA | |
| 1613588 | 1613586 | AACUGAGAGUGA | 181 | 3989 | 4011 | 1613587 | CCCAGCCUCUCA | 229 |
| | | GAGGCUGGGGU | | | | | CUCUCAGUU | |
| 1613594 | 1613592 | UGGUGAGGGUCC | 182 | 4016 | 4038 | 1613593 | AUCCAACUGGGA | 230 |
| | | CAGUUGGAUGA | | | | | CCCUCACCA | |
| 1613597 | 1613595 | AGAUCAUGAGAU | 183 | 4031 | 4053 | 1613596 | UCACCACGAAUC | 231 |
| | | UCGUGGUGAGG | | | | | UCAUGAUCU | |
| 1613600 | 1613598 | ACAGGGAACCGA | 184 | 4046 | 4068 | 1613599 | UGAUCUGAUUCG | 232 |
| | | AUCAGAUCAUG | | | | | GUUCCCUGU | |
| 1613606 | 1613604 | UCACAUCUGUGA | 185 | 4070 | 4092 | 1613605 | CUCCUCCCGUCA | 233 |
| | | CGGGAGGAGGA | | | | | CAGAUGUGA | |
| 1613609 | 1613607 | AGUGCCCUGGCU | 186 | 4081 | 4103 | 1613608 | ACAGAUGUGAGC | 234 |
| | | CACAUCUGUGA | | | | | CAGGGCACU | |
| 1613612 | 1613610 | ACCUAGGGUCAC | 187 | 4101 | 4123 | 1613611 | UGCUCAGCUGUG | 235 |
| | | AGCUGAGCAGU | | | | | ACCCUAGGU | |
| 1613624 | 1613622 | ACAACCAAGACA | 188 | 4199 | 4221 | 1613623 | CAGGCUGGGUGU | 236 |
| | | CCCAGCCUGCU | | | | | CUUGGUUGU | |
| 1613630 | 1613628 | UUCCAUCCUGGU | 189 | 4221 | 4243 | 1613629 | AGUGGUGGCACC | 237 |
| | | GCCACCACUGA | | | | | AGGAUGGAA | |
| 1613633 | 1613631 | UACAAGCUAGGG | 190 | 4282 | 4304 | 1613632 | CCACUUGCACCC | 238 |
| | | UGCAAGUGGGG | | | | | UAGCUUGUA | |
| 1613636 | 1613634 | UGGGAGGUUGGC | 191 | 4297 | 4319 | 1613635 | CUUGUAGCUGCC | 239 |
| | | AGCUACAAGCU | | | | | AACCUCCCA | |
| 1613639 | 1613637 | UGUCUGGGAGGU | 192 | 4301 | 4323 | 1613638 | UAGCUGCCAACC | 240 |
| | | UGGCAGCUACA | | | | | UCCCAGACA | |
| 1613642 | 1613640 | UAUGCAUGUGGA | 193 | 4332 | 4354 | 1613641 | CUGCUCAGCUCC | 241 |
| | | GCUGAGCAGCG | | | | | ACAUGCAUA | |
| 1613648 | 1613646 | UUUGUCGGGUGU | 194 | 4357 | 4379 | 1613647 | CAGCCCUCCACA | 242 |
| | | GGAGGGCUGAU | | | | | CCCGACAAA | |
| 1613654 | 1613652 | ACCAUUUCCAAG | 195 | 4383 | 4405 | 1613653 | ACACACCCCCUU | 243 |
| | | GGGGUGUGUUC | | | | | GGAAAUGGU | |
| 1613660 | 1613658 | UUCCAGCUGGGA | 196 | 4408 | 4430 | 1613659 | UUCCCCCAGUCC | 244 |
| | | CUGGGGGAAAA | | | | | CAGCUGGAA | |
| 1613663 | 1613661 | AACAGACAGCAU | 197 | 4423 | 4445 | 1613662 | CUGGAAGCCAUG | 245 |
| | | GGCUUCCAGCU | | | | | CUGUCUGUU | |
| 1613669 | 1613667 | AUCUAUGUAUAU | 198 | 4453 | 4475 | 1613668 | CAGCUGAACAUA | 246 |
| | | GUUCAGCUGCU | | | | | UACAUAGAU | |
| 1613675 | 1613673 | ACUCAACAGGGU | 199 | 4488 | 4510 | 1613674 | CCCAUCUGCACC | 247 |
| | | GCAGAUGGGGA | | | | | CUGUUGAGU | |
| 1613678 | 1613676 | ACAAAUCCAACU | 200 | 4503 | 4525 | 1613677 | UUGAGUUGUAGU | 248 |
| | | ACAACUCAACA | | | | | UGGAUUUGU | |
| 1613681 | 1613679 | UCCAAGCAUAAA | 201 | 4518 | 4540 | 1613680 | AUUUGUCUGUUU | 249 |
| | | CAGACAAAUCC | | | | | AUGCUUGGA | |
| 1613684 | 1613682 | AGUCACUCUGGU | 202 | 4533 | 4555 | 1613683 | CUUGGAUUCACC | 250 |
| | | GAAUCCAAGCA | | | | | AGAGUGACU | |
| 1613687 | 1613685 | UCUUUUCACUAU | 203 | 4548 | 4570 | 1613686 | GUGACUAUGAUA | 251 |
| | | CAUAGUCACUC | | | | | GUGAAAAGA | |
| 1613690 | 1613688 | UUUUUUUCUUUU | 204 | 4554 | 4576 | 1613689 | AUGAUAGUGAAA | 252 |
| | | CACUAUCAUAG | | | | | AGAAAAAAA | |

TABLE 4
RNAi compounds targeting human MAPT, SEQ ID NO: 1

| | | | | SEQ ID | SEQ ID | | | |
|---|---|---|---|---|---|---|---|---|
| | | | | NO: 1 | NO: 1 | | | |
| | Anti- | Antisense | SEQ | Antisense | Antisense | | Sense | SEQ |
| Compound | sense | Sequence | ID | Start | Stop | Sense | Sequence | ID |
| Number | ID | (5′ to 3′) | NO. | Site | Site | ID | (5′ to 3′) | NO. |
| 1613225 | 1613223 | UUGCUGGAAUCC | 253 | 1824 | 1846 | 1613224 | ACGCCACCAGG | 291 |
| | | UGGUGGCGUUG | | | | | AUUCCAGCAA | |
| 1613231 | 1613229 | UCUUUGGAGCGG | 254 | 1845 | 1867 | 1613230 | AAACCCCGCCC | 292 |
| | | GCGGGGUUUUU | | | | | GCUCCAAAGA | |
| 1613237 | 1613235 | AUUUUGGAGGUU | 255 | 1875 | 1897 | 1613236 | GCUCUGGUGAA | 293 |
| | | CACCAGAGCUG | | | | | CCUCCAAAAU | |
| 1613243 | 1613241 | UAGCCGCUGCGA | 256 | 1894 | 1916 | 1613242 | AUCAGGGGAUC | 294 |
| | | UCCCCUGAUUU | | | | | GCAGCGGCUA | |
| 1613246 | 1613244 | UACGGACCACUG | 257 | 1995 | 2017 | 1613245 | AGAAGGUGGCA | 295 |
| | | CCACCUUCUUG | | | | | GUGGUCCGUA | |
| 1613249 | 1613247 | ACUUGGGUGGAG | 258 | 2007 | 2029 | 1613248 | UGGUCCGUACU | 296 |
| | | UACGGACCACU | | | | | CCACCCAAGU | |
| 1613252 | 1613250 | AAGACGGCGACU | 259 | 2016 | 2038 | 1613251 | CUCCACCCAAG | 297 |
| | | UGGGUGGAGUA | | | | | UCGCCGUCUU | |
| 1613255 | 1613253 | UUCUUCAGGUCU | 260 | 2068 | 2090 | 1613254 | GCCCAUGCCAG | 298 |
| | | GGCAUGGGCAC | | | | | ACCUGAAGAA | |
| 1613258 | 1613256 | AUCUUGGACUUG | 261 | 2083 | 2105 | 1613257 | GAAGAAUGUCA | 299 |
| | | ACAUUCUUCAG | | | | | AGUCCAAGAU | |
| 1613261 | 1613259 | UUCUCAGUGGAG | 262 | 2098 | 2120 | 1613260 | CAAGAUCGGCU | 300 |
| | | CCGAUCUUGGA | | | | | CCACUGAGAA | |
| 1613267 | 1613265 | AUUAUCUGCACC | 263 | 2137 | 2159 | 1613266 | AGGCGGGAAGG | 301 |
| | | UUCCCGCCUCC | | | | | UGCAGAUAAU | |
| 1613270 | 1613268 | UCCAGCUUCUUA | 264 | 2152 | 2174 | 1613269 | GAUAAUUAAUA | 302 |
| | | UUAAUUAUCUG | | | | | AGAAGCUGGA | |
| 1613273 | 1613271 | UGGACGUUGCUA | 265 | 2167 | 2189 | 1613272 | GCUGGAUCUUA | 303 |
| | | AGAUCCAGCUU | | | | | GCAACGUCCA | |
| 1613279 | 1613277 | UUGAUAUUAUCC | 266 | 2197 | 2219 | 1613278 | UGGCUCAAAGG | 304 |
| | | UUUGAGCCACA | | | | | AUAAUAUCAA | |
| 1613288 | 1613286 | ACUAUUUGCACA | 267 | 2230 | 2252 | 1613287 | AGGCGGCAGUG | 305 |
| | | CUGCCGCCUCC | | | | | UGCAAAUAGU | |
| 1613291 | 1613289 | UCAACUGGUUUG | 268 | 2245 | 2267 | 1613290 | AAUAGUCUACA | 306 |
| | | UAGACUAUUUG | | | | | AACCAGUUGA | |
| 1613300 | 1613298 | UGGAUGUUGCCU | 269 | 2290 | 2312 | 1613299 | UGGCUCAUUAG | 307 |
| | | AAUGAGCCACA | | | | | GCAACAUCCA | |
| 1613345 | 1613343 | UUUGGCGUUCUC | 270 | 2453 | 2475 | 1613344 | ACCUUCCGCGA | 308 |
| | | GCGGAAGGUCA | | | | | GAACGCCAAA | |
| 1613351 | 1613349 | UGGCGACUUGUA | 271 | 2495 | 2517 | 1613350 | GAGAUCGUGUA | 309 |
| | | CACGAUCUCCG | | | | | CAAGUCGCCA | |
| 1613357 | 1613355 | UUGCUGAGAUGC | 272 | 2533 | 2555 | 1613356 | GUCUCCACGGC | 310 |
| | | CGUGGAGACGU | | | | | AUCUCAGCAA | |
| 1613363 | 1613361 | AUGCUGCCGGUG | 273 | 2554 | 2576 | 1613362 | UGUCUCCUCCA | 311 |
| | | GAGGAGACAUU | | | | | CCGGCAGCAU | |
| 1613369 | 1613367 | UGGGGCGAGUCU | 274 | 2575 | 2597 | 1613368 | CGACAUGGUAG | 312 |
| | | ACCAUGUCGAU | | | | | ACUCGCCCCA | |
| 1613372 | 1613370 | AUCACAAACCCU | 275 | 2631 | 2653 | 1613371 | UGGCCAAGCAG | 313 |
| | | GCUUGGCCAGG | | | | | GGUUUGUGAU | |
| 1613378 | 1613376 | ACAAUUAUUGAC | 276 | 2658 | 2680 | 1613377 | CCUGGGGCGGU | 314 |
| | | CGCCCCAGGGG | | | | | CAAUAAUUGU | |
| 1613384 | 1613382 | UUUUCCACACUC | 277 | 2688 | 2710 | 1613383 | AGAAUGAGAGA | 315 |
| | | UCUCAUUCUCU | | | | | GUGUGGAAAA | |
| 1613393 | 1613391 | UAACCGAACUGC | 278 | 2748 | 2770 | 1613392 | CUGCUCCUCGC | 316 |
| | | GAGGAGCAGCU | | | | | AGUUCGGUUA | |
| 1613396 | 1613394 | AAGUGAUUAACC | 279 | 2763 | 2785 | 1613395 | CGGUUAAUUGG | 317 |
| | | AAUUAACCGAA | | | | | UUAAUCACUU | |
| 1613399 | 1613397 | UGACAAAAGCAG | 280 | 2778 | 2800 | 1613398 | UCACUUAACCU | 318 |
| | | GUUAAGUGAUU | | | | | GCUUUUGUCA | |
| 1613417 | 1613415 | UAUUUUAUUACU | 281 | 2868 | 2890 | 1613416 | GGGUGGGCUAG | 319 |
| | | AGCCCACCCAU | | | | | UAAUAAAAUA | |
| 1613420 | 1613418 | UUUAAAUAUUUU | 282 | 2874 | 2896 | 1613419 | GCUAGUAAUAA | 320 |
| | | AUUACUAGCCC | | | | | AAUAUUUAAA | |
| 1613426 | 1613424 | AAAUGUUGGAUG | 283 | 2910 | 2932 | 1613425 | ACAUGGCCACA | 321 |
| | | UGGCCAUGUUU | | | | | UCCAACAUUU | |
| 1613429 | 1613427 | AGGAAUUGCCUG | 284 | 2925 | 2947 | 1613428 | ACAUUUCCUCA | 322 |
| | | AGGAAAUGUUG | | | | | GGCAAUUCCU | |
| 1613435 | 1613433 | UACAUGGAGGGG | 285 | 2955 | 2977 | 1613434 | UUUUUCUUCCC | 323 |
| | | GAAGAAAAAAG | | | | | CCUCCAUGUA | |
| 1613438 | 1613436 | UCCUUCUCCCUC | 286 | 2970 | 2992 | 1613437 | CAUGUAGAAGA | 324 |
| | | UUCUACAUGGA | | | | | GGGAGAAGGA | |
| 1613441 | 1613439 | AGCUUUCAGAGC | 287 | 2985 | 3007 | 1613440 | GAAGGAGAGGC | 325 |
| | | CUCUCCUUCUC | | | | | UCUGAAAGCU | |
| 1613444 | 1613442 | AAAUCCCCCAGA | 288 | 3000 | 3022 | 1613443 | AAAGCUGCUUC | 326 |
| | | AGCAGCUUUCA | | | | | UGGGGGAUUU | |
| 1613450 | 1613448 | UUGGCACCCCCA | 289 | 3020 | 3042 | 1613449 | UCAAGGGACUG | 327 |
| | | GUCCCUUGAAA | | | | | GGGGUGCCAA | |
| 1613453 | 1613451 | UUGCUGCCACUG | 290 | 3067 | 3089 | 1613452 | UCACAGAGGCA | 328 |
| | | CCUCUGUGACA | | | | | GUGGCAGCAA | |

TABLE 5
RNAi compounds targeting human MAPT, SEQ ID NO: 1

| | | | | SEQ ID | SEQ ID | | | |
|---|---|---|---|---|---|---|---|---|
| | | | | NO: 1 | NO: 1 | | | |
| | Anti- | Antisense | SEQ | Antisense | Antisense | | Sense | SEQ |
| Compound | sense | Sequence | ID | Start | Stop | Sense | Sequence | ID |
| Number | ID | (5′ to 3′) | NO. | Site | Site | ID | (5′ to 3′) | NO. |
| 1612979 | 1612977 | UGAUAGUCGACA | 329 | 110 | 132 | 1612978 | CCUCGCCUCUG | 376 |
| | | GAGGCGAGGAC | | | | | UCGACUAUCA | |
| 1612988 | 1612986 | UCCAUCACUUCG | 330 | 163 | 185 | 1612987 | CCAGGAGUUCG | 377 |
| | | AACUCCUGGCG | | | | | AAGUGAUGGA | |
| 1612997 | 1612995 | UCUUUCCUGUCC | 331 | 202 | 224 | 1612996 | CGGGUUGGGGG | 378 |
| | | CCCAACCCGUA | | | | | ACAGGAAAGA | |
| 1613003 | 1613001 | UGGUCUUGGUGC | 332 | 232 | 254 | 1613002 | CUACACCAUGC | 379 |
| | | AUGGUGUAGCC | | | | | ACCAAGACCA | |
| 1613006 | 1613004 | UCCGUGUCACCC | 333 | 247 | 269 | 1613005 | AGACCAAGAGG | 380 |
| | | UCUUGGUCUUG | | | | | GUGACACGGA | |
| 1613012 | 1613010 | UUCUUUCAGGCC | 334 | 263 | 285 | 1613011 | ACGGACGCUGG | 381 |
| | | AGCGUCCGUGU | | | | | CCUGAAAGAA | |
| 1613021 | 1613019 | UUCCUCAGAUCC | 335 | 302 | 324 | 1613020 | ACUGAGGACGG | 382 |
| | | GUCCUCAGUGG | | | | | AUCUGAGGAA | |
| 1613030 | 1613028 | UCCGCUGUUGGA | 336 | 346 | 368 | 1613029 | UAAGAGCACUC | 383 |
| | | GUGCUCUUAGC | | | | | CAACAGCGGA | |
| 1613039 | 1613037 | UGACCAGCAGCU | 337 | 403 | 425 | 1613038 | GGAAGACGAAG | 384 |
| | | UCGUCUUCCAG | | | | | CUGCUGGUCA | |
| 1613042 | 1613040 | UUGGGUCACGUG | 338 | 413 | 435 | 1613041 | GCUGCUGGUCA | 385 |
| | | ACCAGCAGCUU | | | | | CGUGACCCAA | |
| 1613045 | 1613043 | AACUCUCAACUC | 339 | 428 | 450 | 1613044 | ACCCAAGAGGA | 386 |
| | | CUCUUGGGUCA | | | | | GUUGAGAGUU | |
| 1613051 | 1613049 | UCUCAUUGGCCA | 340 | 474 | 496 | 1613050 | AAAGGCCCCUG | 387 |
| | | GGGGCCUUUCA | | | | | GCCAAUGAGA | |
| 1613060 | 1613058 | AGCUUCUGGCUC | 341 | 557 | 579 | 1613059 | GGGGAGAAAGA | 388 |
| | | UUUCUCCCCGA | | | | | GCCAGAAGCU | |
| 1613066 | 1613064 | UUUUUGUCCCCA | 342 | 659 | 681 | 1613065 | UCCCUGGAGUG | 389 |
| | | CUCCAGGGAGG | | | | | GGGACAAAAA | |
| 1613072 | 1613070 | UGUGUGGAGAUA | 343 | 725 | 747 | 1613071 | ACCACUGCGUA | 390 |
| | | CGCAGUGGUGG | | | | | UCUCCACACA | |
| 1613075 | 1613073 | ACCACUUUCAGG | 344 | 740 | 762 | 1613074 | CACACAGAGCC | 391 |
| | | CUCUGUGUGGA | | | | | UGAAAGUGGU | |
| 1613078 | 1613076 | UUCCUGGACCAC | 345 | 755 | 777 | 1613077 | AGUGGUAAGGU | 392 |
| | | CUUACCACUUU | | | | | GGUCCAGGAA | |
| 1613081 | 1613079 | AGGAAGCCUUCC | 346 | 763 | 785 | 1613080 | GGUGGUCCAGG | 393 |
| | | UGGACCACCUU | | | | | AAGGCUUCCU | |
| 1613084 | 1613082 | ACAUGAGCUGGU | 347 | 804 | 826 | 1613083 | GUCUGAGCCAC | 394 |
| | | GGCUCAGACCU | | | | | CAGCUCAUGU | |
| 1613087 | 1613085 | AAGCUGGUGCUU | 348 | 929 | 951 | 1613086 | GAGCUGCUCAA | 395 |
| | | GAGCAGCUCAG | | | | | GCACCAGCUU | |
| 1613096 | 1613094 | UUCAUCCACCUC | 349 | 1013 | 1035 | 1613095 | AGCAAGGAGGA | 396 |
| | | CUCCUUGCUCC | | | | | GGUGGAUGAA | |
| 1613099 | 1613097 | AUCGACGUCGCG | 350 | 1028 | 1050 | 1613098 | GAUGAAGACCG | 397 |
| | | GUCUUCAUCCA | | | | | CGACGUCGAU | |
| 1613102 | 1613100 | ACUCAUCGACGU | 351 | 1032 | 1054 | 1613101 | AAGACCGCGAC | 398 |
| | | CGCGGUCUUCA | | | | | GUCGAUGAGU | |
| 1613105 | 1613103 | AGGAAAUCCACA | 352 | 1168 | 1190 | 1613104 | CCCCCUCCCUG | 399 |
| | | GGGAGGGGGAU | | | | | UGGAUUUCCU | |
| 1613114 | 1613112 | UCUGAGGCUGGG | 353 | 1201 | 1223 | 1613113 | CACAGAGAUCC | 400 |
| | | AUCUCUGUGGA | | | | | CAGCCUCAGA | |
| 1613117 | 1613115 | AAACGUGAACUC | 354 | 1262 | 1284 | 1613116 | GCCCCCCUGGA | 401 |
| | | CAGGGGGGCAU | | | | | GUUCACGUUU | |
| 1613120 | 1613118 | UGUGAUUUCCAC | 355 | 1277 | 1299 | 1613119 | ACGUUUCACGU | 402 |
| | | GUGAAACGUGA | | | | | GGAAAUCACA | |
| 1613126 | 1613124 | UGCUCCUUCUGC | 356 | 1297 | 1319 | 1613125 | ACCCAACGUGC | 403 |
| | | ACGUUGGGUGU | | | | | AGAAGGAGCA | |
| 1613129 | 1613127 | UUCCCAAAUGCU | 357 | 1323 | 1345 | 1613128 | ACUCGGAGGAG | 404 |
| | | CCUCCGAGUGC | | | | | CAUUUGGGAA | |
| 1613138 | 1613136 | UUGUGUCCUCUC | 358 | 1392 | 1414 | 1613137 | CCUCUUUGGGA | 405 |
| | | CCAAAGAGGGG | | | | | GAGGACACAA | |
| 1613144 | 1613142 | UUUCAGAGGGCU | 359 | 1422 | 1444 | 1613143 | ACCUUCCAGAG | 406 |
| | | CUGGAAGGUCA | | | | | CCCUCUGAAA | |
| 1613153 | 1613151 | UUUGAGUUGAGG | 360 | 1478 | 1500 | 1613152 | AGCCGGGUCCC | 407 |
| | | GACCCGGCUGA | | | | | UCAACUCAAA | |
| 1613156 | 1613154 | ACUGACCAUGCG | 361 | 1493 | 1515 | 1613155 | CUCAAAGCUCG | 408 |
| | | AGCUUUGAGUU | | | | | CAUGGUCAGU | |
| 1613165 | 1613163 | UGUCUUGGCUUU | 362 | 1538 | 1560 | 1613164 | GAUGACAAAAA | 409 |
| | | UUUGUCAUCGC | | | | | AGCCAAGACA | |
| 1613168 | 1613166 | AGAGGAACGUGU | 363 | 1553 | 1575 | 1613167 | AAGACAUCCAC | 410 |
| | | GGAUGUCUUGG | | | | | ACGUUCCUCU | |
| 1613171 | 1613169 | UUUCAAGGUUUU | 364 | 1568 | 1590 | 1613170 | UCCUCUGCUAA | 411 |
| | | AGCAGAGGAAC | | | | | AACCUUGAAA | |
| 1613174 | 1613172 | AAGGCAAGGCCU | 365 | 1583 | 1605 | 1613173 | UUGAAAAAUAG | 412 |
| | | AUUUUUCAAGG | | | | | GCCUUGCCUU | |
| 1613183 | 1613175 | UGUUUGGGGCUA | 366 | 1594 | 1616 | 1613179 | GCCUUGCCUUA | 413 |
| | | AGGCAAGGCCU | | | | | GCCCCAAACA | |
| 1613189 | 1613187 | AGGAGUGGGGUG | 367 | 1604 | 1626 | 1613188 | AGCCCCAAACA | 414 |
| | | UUUGGGGCUAA | | | | | CCCCACUCCU | |
| 1613192 | 1613190 | UGAGCUACCAGG | 368 | 1613 | 1635 | 1613191 | CACCCCACUCC | 415 |
| | | AGUGGGGUGUU | | | | | UGGUAGCUCA | |
| 1613195 | 1613193 | UUGGAUCAGAGG | 369 | 1628 | 1650 | 1613194 | AGCUCAGACCC | 416 |
| | | GUCUGAGCUAC | | | | | UCUGAUCCAA | |
| 1613198 | 1613196 | UGGAGGGUUGGA | 370 | 1635 | 1657 | 1613197 | ACCCUCUGAUC | 417 |
| | | UCAGAGGGUCU | | | | | CAACCCUCCA | |
| 1613201 | 1613199 | UUAGGAGAGGAA | 371 | 1672 | 1694 | 1613200 | AGAGCCACCUU | 418 |
| | | GGUGGCUCUGG | | | | | CCUCUCCUAA | |
| 1613204 | 1613202 | ACAGAAGAGACG | 372 | 1687 | 1709 | 1613203 | UCCUAAAUACG | 419 |
| | | UAUUUAGGAGA | | | | | UCUCUUCUGU | |
| 1613210 | 1613208 | UUUGCUCCAGAA | 373 | 1717 | 1739 | 1613209 | AACUGGCAGUU | 420 |
| | | CUGCCAGUUCG | | | | | CUGGAGCAAA | |
| 1613213 | 1613211 | UUGAGUUUCAUC | 374 | 1732 | 1754 | 1613212 | AGCAAAGGAGA | 421 |
| | | UCCUUUGCUCC | | | | | UGAAACUCAA | |
| 1613216 | 1613214 | UUACCAUCAGCC | 375 | 1747 | 1769 | 1613215 | ACUCAAGGGGG | 422 |
| | | CCCUUGAGUUU | | | | | CUGAUGGUAA | |

[0571] “Start site” indicates the 5′-most nucleoside to which the antisense RNAi oligonucleotide is complementary in the target nucleic acid sequence. “Stop site” indicates the 3′-most nucleoside to which the antisense RNAi oligonucleotide is complementary in the target nucleic acid sequence. Each antisense RNAi oligonucleotide listed in the tables below has a single mismatch to SEQ ID NO: 1 (described herein above), wherein the mismatch is located at position 1 on the 5′ end of the antisense sequence.

TABLE 6
RNAi compounds targeting human MAPT, SEQ ID NO: 1

| | | | | SEQ ID | SEQ ID | | | |
|---|---|---|---|---|---|---|---|---|
| | | | | NO: 1 | NO: 1 | | | |
| | Anti- | Antisense | SEQ | Antisense | Antisense | | Sense | SEQ |
| Compound | sense | Sequence | ID | Start | Stop | Sense | Sequence | ID |
| Number | ID | (5′ to 3′) | NO. | Site | Site | ID | (5′ to 3′) | NO. |
| 1613948 | 1613946 | AACUGAAGUCAA | 423 | 5959 | 5980 | 1613947 | CCAUUUAAAUU | 453 |
| | | UUUAAAUGGAA | | | | | GACUUCAGUU | |
| 1613954 | 1613952 | AAAGCAAUAGCA | 424 | 5989 | 6010 | 1613953 | UAUCCUGUUUG | 454 |
| | | AACAGGAUACA | | | | | CUAUUGCUUU | |
| 1613957 | 1613955 | ACCCCCAUAGCAC | 425 | 6004 | 6025 | 1613956 | UGCUUGUUGUG | 455 |
| | | AACAAGCAAU | | | | | CUAUGGGGGU | |
| 1613960 | 1613958 | AUCCCCCCAUAGC | 426 | 6006 | 6027 | 1613959 | CUUGUUGUGCU | 456 |
| | | ACAACAAGCA | | | | | AUGGGGGGAU | |
| 1613969 | 1613967 | ACCAAGAUCUCC | 427 | 6055 | 6076 | 1613968 | UGGGCAAAGGG | 457 |
| | | CUUUGCCCAUG | | | | | AGAUCUUGGU | |
| 1613972 | 1613970 | AUUUAAGUGCUG | 428 | 6070 | 6091 | 1613971 | CUUGGGGUGCA | 458 |
| | | CACCCCAAGAU | | | | | GCACUUAAAU | |
| 1613978 | 1613976 | AGUUGAAAUCAU | 429 | 6100 | 6121 | 1613977 | ACCCUUUUCAU | 459 |
| | | GAAAAGGGUUA | | | | | GAUUUCAACU | |
| 1613981 | 1613979 | ACCUCUAGCAAA | 430 | 6115 | 6136 | 1613980 | UCAACCACAUU | 460 |
| | | UGUGGUUGAAA | | | | | UGCUAGAGGU | |
| 1613984 | 1613982 | ACUGCUCCCUCCC | 431 | 6125 | 6146 | 1613983 | UUGCUAGAGGG | 461 |
| | | UCUAGCAAAU | | | | | AGGGAGCAGU | |
| 1613990 | 1613988 | AUCAGUGGAAAA | 432 | 6166 | 6187 | 1613989 | GGGUUUCUCUU | 462 |
| | | GAGAAACCCCA | | | | | UUCCACUGAU | |
| 1613993 | 1613991 | ACUGGGAAAGCC | 433 | 6179 | 6200 | 1613992 | CCACUGACAGGC | 463 |
| | | UGUCAGUGGAA | | | | | UUUCCCAGU | |
| 1614002 | 1614000 | AUGGCUGGGGAG | 434 | 6210 | 6231 | 1614001 | GUUCAUUCCCUC | 464 |
| | | GGAAUGAACUA | | | | | CCCAGCCAU | |
| 1614008 | 1614006 | ACAACCAGAUGU | 435 | 6242 | 6263 | 1614007 | GGAAUAUGGAC | 465 |
| | | CCAUAUUCCUA | | | | | AUCUGGUUGU | |
| 1614011 | 1614009 | ACAGCAGGCCAA | 436 | 6255 | 6276 | 1614010 | CUGGUUGCUUU | 466 |
| | | AGCAACCAGAU | | | | | GGCCUGCUGU | |
| 1614014 | 1614012 | AUGAAAGAGGGC | 437 | 6265 | 6286 | 1614013 | UGGCCUGCUGCC | 467 |
| | | AGCAGGCCAAA | | | | | CUCUUUCAU | |
| 1614017 | 1614015 | AUGGGCUUAGGA | 438 | 6280 | 6301 | 1614016 | UUUCAGGGGUC | 468 |
| | | CCCCUGAAAGA | | | | | CUAAGCCCAU | |
| 1614029 | 1614027 | AACAGAGGUGCC | 439 | 6337 | 6358 | 1614028 | UAAGCCGUUGG | 469 |
| | | AACGGCUUAGA | | | | | CACCUCUGUU | |
| 1614041 | 1614039 | ACGAGUGAUCUC | 440 | 6396 | 6417 | 1614040 | UUUGGAGCUGA | 470 |
| | | AGCUCCAAAAG | | | | | GAUCACUCGU | |
| 1614054 | 1614042 | AAUGAGGAGGGU | 441 | 6411 | 6432 | 1614043 | ACUCGCUUCACC | 471 |
| | | GAAGCGAGUGA | | | | | CUCCUCAUU | |
| 1614110 | 1614088 | ACGACCUCGUGG | 442 | 6441 | 6462 | 1614099 | CAAGUAAAGCC | 472 |
| | | CUUUACUUGGA | | | | | ACGAGGUCGU | |
| 1614134 | 1614132 | ACUGCAGGUCUG | 443 | 6490 | 6511 | 1614133 | UCCCAUCUACAG | 473 |
| | | UAGAUGGGACA | | | | | ACCUGCAGU | |
| 1614137 | 1614135 | AAGAAGUUUUAU | 444 | 6505 | 6526 | 1614136 | UGCAGCUUCAU | 474 |
| | | GAAGCUGCAGG | | | | | AAAACUUCUU | |
| 1614143 | 1614141 | AGGUAACCCUUU | 445 | 6535 | 6556 | 1614142 | CAGCUUUGAAA | 475 |
| | | UCAAAGCUGAA | | | | | AGGGUUACCU | |
| 1614146 | 1614144 | ACAGUGCCCAGG | 446 | 6545 | 6566 | 1614145 | AAGGGUUACCC | 476 |
| | | GUAACCCUUUU | | | | | UGGGCACUGU | |
| 1614155 | 1614153 | AAACAUGGCAAA | 447 | 6595 | 6616 | 1614154 | CCCCAUGAGUU | 477 |
| | | CUCAUGGGGCU | | | | | UGCCAUGUUU | |
| 1614161 | 1614159 | AGACUUGCAAGU | 448 | 6625 | 6646 | 1614160 | AUUUCUGGCAC | 478 |
| | | GCCAGAAAUAG | | | | | UUGCAAGUCU | |
| 1614167 | 1614165 | ACCACCCUCAGA | 449 | 6655 | 6676 | 1614166 | UUCGGUAAUUC | 479 |
| | | AUUACCGAAGA | | | | | UGAGGGUGGU | |
| 1614170 | 1614168 | ACCCCACCCUCAG | 450 | 6657 | 6678 | 1614169 | CGGUAAUUCUG | 480 |
| | | AAUUACCGAA | | | | | AGGGUGGGGU | |
| 1614179 | 1614177 | AACAUUCACAGA | 451 | 6703 | 6724 | 1614178 | AGCUUUCUGUC | 48 |
| | | CAGAAAGCUAA | | | | | UGUGAAUGUU | |
| 1614185 | 1614183 | AAUUUGUUAAAA | 452 | 6733 | 6754 | 1614184 | UAUUGUGUGUU | 482 |
| | | CACACAAUACA | | | | | UUAACAAAUU | |

TABLE 7
RNAi compounds targeting human MAPT, SEQ ID NO: 1

| | | | | SEQ ID | SEQ ID | | | |
|---|---|---|---|---|---|---|---|---|
| | | | | NO: 1 | NO: 1 | | | |
| | Anti- | Antisense | SEQ | Antisense | Antisense | | Sense | SEQ |
| Compound | sense | Sequence | ID | Start | Stop | Sense | Sequence | ID |
| Number | ID | (5′ to 3′) | NO. | Site | Site | ID | (5′ to 3′) | NO. |
| 1613702 | 1613700 | AUGAGGGUGGGU | 483 | 4616 | 4637 | 1613701 | AGGUUUCUAAC | 517 |
| | | UAGAAACCUCU | | | | | CCACCCUCAU | |
| 1613711 | 1613709 | ACUGAGGAAAGC | 484 | 4707 | 4728 | 1613710 | UUUUGAAAGGC | 518 |
| | | CUUUCAAAACU | | | | | UUUCCUCAGU | |
| 1613720 | 1613718 | ACCUCCUUAGCU | 485 | 4750 | 4771 | 1613719 | GCUUCUAGCAG | 519 |
| | | GCUAGAAGCUG | | | | | CUAAGGAGGU | |
| 1613723 | 1613721 | AUCACAGCUGAA | 486 | 4764 | 4785 | 1613722 | AGGAGGCCGUU | 520 |
| | | CGGCCUCCUUA | | | | | CAGCUGUGAU | |
| 1613732 | 1613730 | AGGGACAUCAUC | 487 | 4808 | 4829 | 1613731 | GACUGAAGCGA | 521 |
| | | GCUUCAGUCCU | | | | | UGAUGUCCCU | |
| 1613756 | 1613754 | ACUUUGGGACUG | 488 | 4932 | 4953 | 1613755 | GUCUCAUGGCA | 522 |
| | | CCAUGAGACUU | | | | | GUCCCAAAGU | |
| 1613765 | 1613763 | AUGGCAGUGGCU | 489 | 4977 | 4998 | 1613764 | GAAAAAGGAAG | 523 |
| | | UCCUUUUUCUU | | | | | CCACUGCCAU | |
| 1613768 | 1613766 | ACAGCUGGCAGU | 490 | 4981 | 5002 | 1613767 | AAGGAAGCCAC | 524 |
| | | GGCUUCCUUUU | | | | | UGCCAGCUGU | |
| 1613774 | 1613772 | AAGCUUGGAGAG | 491 | 5050 | 5071 | 1613773 | ACUGGGUUCCU | 525 |
| | | GAACCCAGUCU | | | | | CUCCAAGCUU | |
| 1613783 | 1613781 | ACCUCUAGAGCA | 492 | 5144 | 5165 | 1613782 | UCCUGGAUCUG | 526 |
| | | GAUCCAGGACA | | | | | CUCUAGAGGU | |
| 1613786 | 1613784 | AAGCUUGGGCCU | 493 | 5152 | 5173 | 1613785 | CUGCUCUAGAG | 527 |
| | | CUAGAGCAGAU | | | | | GCCCAAGCUU | |
| 1613792 | 1613790 | AUGACUUGUCAA | 494 | 5184 | 5205 | 1613791 | AAGGAUGACUU | 528 |
| | | GUCAUCCUUCC | | | | | GACAAGUCAU | |
| 1613798 | 1613796 | AUCUGGUCAAGG | 495 | 5214 | 5235 | 1613797 | UUCCCAAAGCC | 529 |
| | | CUUUGGGAACA | | | | | UUGACCAGAU | |
| 1613801 | 1613799 | AUGAGGUGCUCU | 496 | 5222 | 5243 | 1613800 | GCCUUGACCAG | 530 |
| | | GGUCAAGGCUU | | | | | AGCACCUCAU | |
| 1613810 | 1613808 | ACUUCCCUUUUC | 497 | 5271 | 5292 | 1613809 | CUGCCAUGAGA | 531 |
| | | UCAUGGCAGCA | | | | | AAAGGGAAGU | |
| 1613819 | 1613817 | AUGAGGCUGCUG | 498 | 5316 | 5337 | 1613818 | AAAGAAACUCA | 532 |
| | | AGUUUCUUUAG | | | | | GCAGCCUCAU | |
| 1613825 | 1613823 | AAAACCAGAAGU | 499 | 5341 | 5362 | 1613824 | AAUUCUGCCAC | 533 |
| | | GGCAGAAUUGG | | | | | UUCUGGUUUU | |
| 1613828 | 1613826 | ACCUUUAACUGU | 500 | 5356 | 5377 | 1613827 | GGUUUGGGUAC | 534 |
| | | ACCCAAACCAG | | | | | AGUUAAAGGU | |
| 1613843 | 1613841 | ACUUUCAGGUAA | 501 | 5440 | 5461 | 1613842 | GCUAGAGCUUU | 535 |
| | | AGCUCUAGCUG | | | | | ACCUGAAAGU | |
| 1613849 | 1613847 | AAGAGUUCUGGG | 502 | 5463 | 5484 | 1613848 | GUCUCUGGGCC | 536 |
| | | CCCAGAGACUU | | | | | CAGAACUCUU | |
| 1613852 | 1613850 | AGAGGCUCUUGG | 503 | 5477 | 5498 | 1613851 | AACUCUCCACC | 537 |
| | | UGGAGAGUUCU | | | | | AAGAGCCUCU | |
| 1613861 | 1613859 | ACUUCAACUUAG | 504 | 5518 | 5539 | 1613860 | GCAAUUCUCCU | 538 |
| | | GAGAAUUGCUG | | | | | AAGUUGAAGU | |
| 1613873 | 1613871 | AGGGGGCAUAUC | 505 | 5578 | 5599 | 1613872 | GUGGUUAGAGA | 539 |
| | | UCUAACCACCA | | | | | UAUGCCCCCU | |
| 1613891 | 1613880 | ACGAGGUGCGUG | 506 | 5623 | 5644 | 1613887 | GCAUUUCUUCA | 540 |
| | | AAGAAAUGCAG | | | | | CGCACCUCGU | |
| 1613894 | 1613892 | AUUCAGGAAGAG | 507 | 5638 | 5659 | 1613893 | CCUCGGUUCCU | 541 |
| | | GAACCGAGGUG | | | | | CUUCCUGAAU | |
| 1613903 | 1613901 | AGUAUAAGAAGG | 508 | 5680 | 5701 | 1613902 | CACCAUGGGCC | 542 |
| | | CCCAUGGUGCU | | | | | UUCUUAUACU | |
| 1613906 | 1613904 | AAUCCCAGAGCC | 509 | 5695 | 5716 | 1613905 | UAUACGGAAGG | 543 |
| | | UUCCGUAUAAG | | | | | CUCUGGGAUU | |
| 1613909 | 1613907 | AGAGAUCCCAGA | 510 | 5698 | 5719 | 1613908 | ACGGAAGGCUC | 544 |
| | | GCCUUCCGUAU | | | | | UGGGAUCUCU | |
| 1613915 | 1613913 | AAUCACCCUAAA | 511 | 5751 | 5772 | 1613914 | AGAUCAUGGUU | 545 |
| | | CCAUGAUCUUA | | | | | UAGGGUGAUU | |
| 1613921 | 1613919 | ACGUGCCUUUUC | 512 | 5781 | 5802 | 1613920 | AGAUAAAUUGA | 546 |
| | | AAUUUAUCUGC | | | | | AAAGGCACGU | |
| 1613927 | 1613925 | AGGAUUGUCCUC | 513 | 5811 | 5832 | 1613926 | AUCUUAAAUGA | 547 |
| | | AUUUAAGAUCA | | | | | GGACAAUCCU | |
| 1613930 | 1613928 | ACCUGGGGGGAU | 514 | 5818 | 5839 | 1613929 | AUGAGGACAAU | 548 |
| | | UGUCCUCAUUU | | | | | CCCCCCAGGU | |
| 1613936 | 1613934 | AAUACAGUAUAU | 515 | 5899 | 5920 | 1613935 | CUAGAUAGGAU | 549 |
| | | CCUAUCUAGCC | | | | | AUACUGUAUU | |
| 1613939 | 1613937 | ACUUGAAGGAGC | 516 | 5914 | 5935 | 1613938 | UGUAUGCCGGC | 550 |
| | | CGGCAUACAGU | | | | | UCCUUCAAGU | |

TABLE 8
RNAi compounds targeting human MAPT, SEQ ID NO: 1

| | | | | SEQ ID | SEQ ID | | | |
|---|---|---|---|---|---|---|---|---|
| | | | | NO: 1 | NO: 1 | | | |
| | Anti- | Antisense | SEQ | Antisense | Antisense | | Sense | SEQ |
| Compound | sense | Sequence | ID | Start | Stop | Sense | Sequence | ID |
| Number | ID | (5′ to 3′) | NO. | Site | Site | ID | (5′ to 3′) | NO. |
| 1613465 | 1613463 | AUUGACAUCGUC | 551 | 3120 | 3141 | 1613464 | CCACAGGCAGAC | 581 |
| | | UGCCUGUGGCU | | | | | GAUGUCAAU | |
| 1613471 | 1613469 | AAACCCCCGUCA | 552 | 3144 | 3165 | 1613470 | GUGUGAGUGUG | 582 |
| | | CACUCACACAA | | | | | ACGGGGGUUU | |
| 1613480 | 1613478 | AUUCCUCUCCCA | 553 | 3231 | 3252 | 1613479 | AAGUGGGAGUG | 583 |
| | | CUCCCACUUCU | | | | | GGAGAGGAAU | |
| 1613489 | 1613487 | ACAAGGAGGGGG | 554 | 3265 | 3286 | 1613488 | AGUAGACAUCCC | 584 |
| | | AUGUCUACUCU | | | | | CCUCCUUGU | |
| 1613498 | 1613496 | AUCCUGCCAGCU | 555 | 3426 | 3447 | 1613497 | GAGAAGGCAAGC | 585 |
| | | UGCCUUCUCUU | | | | | UGGCAGGAU | |
| 1613504 | 1613502 | AGUCAGUCUUUU | 556 | 3466 | 3487 | 1613503 | CCUCCUUAGAAA | 586 |
| | | CUAAGGAGGUC | | | | | AGACUGACU | |
| 1613507 | 1613505 | AUCUCAAGACAU | 557 | 3481 | 3502 | 1613506 | CUGACCUUGAUG | 587 |
| | | CAAGGUCAGUC | | | | | UCUUGAGAU | |
| 1613516 | 1613514 | AUCAAUAAAACA | 558 | 3567 | 3588 | 1613515 | CAGAAACCCUGU | 588 |
| | | GGGUUUCUGUG | | | | | UUUAUUGAU | |
| 1613528 | 1613526 | ACCUAAAGUCCC | 559 | 3627 | 3648 | 1613527 | UGCAGACCUGGG | 589 |
| | | AGGUCUGCAAA | | | | | ACUUUAGGU | |
| 1613534 | 1613532 | ACACAAGUCCUU | 560 | 3657 | 3678 | 1613533 | UCUCUUUGUAAG | 590 |
| | | ACAAAGAGAAC | | | | | GACUUGUGU | |
| 1613537 | 1613535 | AACGUCUCCCAA | 561 | 3672 | 3693 | 1613536 | UUGUGCCUCUUG | 591 |
| | | GAGGCACAAGU | | | | | GGAGACGUU | |
| 1613561 | 1613559 | AGCUGGGAAUUC | 562 | 3864 | 3885 | 1613560 | CAAUGUCCCGAA | 592 |
| | | GGGACAUUGUG | | | | | UUCCCAGCU | |
| 1613570 | 1613568 | AUCCUGCAACCA | 563 | 3906 | 3927 | 1613569 | GACCCUGGUUGG | 593 |
| | | ACCAGGGUCAU | | | | | UUGCAGGAU | |
| 1613573 | 1613571 | AUAUGGAGUAG | 564 | 3921 | 3942 | 1613572 | CAGGAGGUACCU | 594 |
| | | GUACCUCCUGCA | | | | | ACUCCAUAU | |
| 1613579 | 1613577 | AGACUUUGCCUU | 565 | 3951 | 3972 | 1613578 | AAUUAAGGGAA | 595 |
| | | CCCUUAAUUUC | | | | | GGCAAAGUCU | |
| 1613582 | 1613580 | ACCACUCUUGUG | 566 | 3966 | 3987 | 1613581 | AAGUCCAGGCAC | 596 |
| | | CCUGGACUUUG | | | | | AAGAGUGGU | |
| 1613585 | 1613583 | AUCCCACUCUUG | 567 | 3968 | 3989 | 1613584 | GUCCAGGCACAA | 597 |
| | | UGCCUGGACUU | | | | | GAGUGGGAU | |
| 1613591 | 1613589 | AAGUUGGAUGA | 568 | 4004 | 4025 | 1613590 | UCAGUUCCACUC | 598 |
| | | GUGGAACUGAGA | | | | | AUCCAACUU | |
| 1613603 | 1613601 | AAGGAGGAGACA | 569 | 4055 | 4076 | 1613602 | UCGGUUCCCUGU | 599 |
| | | GGGAACCGAAU | | | | | CUCCUCCUU | |
| 1613615 | 1613613 | AAACAAGGCAGA | 570 | 4116 | 4137 | 1613614 | CUAGGUGUUUCU | 600 |
| | | AACACCUAGGG | | | | | GCCUUGUUU | |
| 1613618 | 1613616 | AGGCUCUCUCCA | 571 | 4131 | 4152 | 1613617 | UUGUUGACAUGG | 601 |
| | | UGUCAACAAGG | | | | | AGAGAGCCU | |
| 1613621 | 1613619 | AUUCUCAGGGGA | 572 | 4145 | 4166 | 1613620 | AGAGCCCUUUCC | 602 |
| | | AAGGGCUCUCU | | | | | CCUGAGAAU | |
| 1613627 | 1613625 | AUGGUGCCACCA | 573 | 4214 | 4235 | 1613626 | GGUUGUCAGUGG | 603 |
| | | CUGACAACCAA | | | | | UGGCACCAU | |
| 1613645 | 1613643 | AUGGAGGGCUGA | 574 | 4347 | 4368 | 1613644 | UGCAUAGUAUCA | 604 |
| | | UACUAUGCAUG | | | | | GCCCUCCAU | |
| 1613651 | 1613649 | AUGUGUUCCCCU | 575 | 4368 | 4389 | 1613650 | ACCCGACAAAGG | 605 |
| | | UUGUCGGGUGU | | | | | GGAACACAU | |
| 1613657 | 1613655 | AACUGGGGGAAA | 576 | 4398 | 4419 | 1613656 | AAUGGUUCUUUU | 606 |
| | | AGAACCAUUUC | | | | | CCCCCAGUU | |
| 1613666 | 1613664 | AAGCUGCUCCAG | 577 | 4438 | 4459 | 1613665 | UCUGUUCUGCUG | 607 |
| | | CAGAACAGACA | | | | | GAGCAGCUU | |
| 1613672 | 1613670 | AGAGGGCAGGGC | 578 | 4468 | 4489 | 1613671 | AUAGAUGUUGCC | 608 |
| | | AACAUCUAUGU | | | | | CUGCCCUCU | |
| 1613693 | 1613691 | ACGUCCUUUUUU | 579 | 4571 | 4592 | 1613692 | AAAAAAAAAAA | 609 |
| | | UUUUUUUUUUU | | | | | AAAAGGACGU | |
| 1613696 | 1613694 | AAUUUCAAGAUA | 580 | 4586 | 4607 | 1613695 | GGACGCAUGUAU | 610 |
| | | CAUGCGUCCUU | | | | | CUUGAAAUU | |

TABLE 9
RNAi compounds targeting human MAPT, SEQ ID NO: 1

| | | | | SEQ ID | SEQ ID | | | |
|---|---|---|---|---|---|---|---|---|
| | | | | NO: 1 | NO: 1 | | | |
| | Anti- | Antisense | SEQ | Antisense | Antisense | | Sense | SEQ |
| Compound | sense | Sequence | ID | Start | Stop | Sense | Sequence | ID |
| Number | ID | (5′ to 3′) | NO. | Site | Site | ID | (5′ to 3′) | NO. |
| 1613222 | 1613220 | AGCGGUGUGGCG | 611 | 1768 | 1789 | 1613221 | AACGAAGAUCG | 651 |
| | | AUCUUCGUUUU | | | | | CCACACCGCU | |
| 1613228 | 1613226 | AGCGGGGUUUUU | 612 | 1834 | 1855 | 1613227 | GAUUCCAGCAA | 652 |
| | | GCUGGAAUCCU | | | | | AAACCCCGCU | |
| 1613234 | 1613232 | AAGAGCUGGGUG | 613 | 1860 | 1881 | 1613233 | CAAAGACACCA | 653 |
| | | GUGUCUUUGGA | | | | | CCCAGCUCUU | |
| 1613240 | 1613238 | AGCUGCGAUCCC | 614 | 1890 | 1911 | 1613239 | CAAAAUCAGGG | 654 |
| | | CUGAUUUUGGA | | | | | GAUCGCAGCU | |
| 1613264 | 1613262 | AGCUGGUGCUUC | 615 | 2113 | 2134 | 1613263 | UGAGAACCUGA | 655 |
| | | AGGUUCUCAGU | | | | | AGCACCAGCU | |
| 1613276 | 1613274 | AAGCCACACUUG | 616 | 2182 | 2203 | 1613275 | CGUCCAGUCCA | 656 |
| | | GACUGGACGUU | | | | | AGUGUGGCUU | |
| 1613282 | 1613280 | ACUCCCGGGACG | 617 | 2212 | 2233 | 1613281 | UAUCAAACACG | 657 |
| | | UGUUUGAUAUU | | | | | UCCCGGGAGU | |
| 1613285 | 1613283 | ACCUCCCGGGAC | 618 | 2213 | 2234 | 1613284 | AUCAAACACGU | 658 |
| | | GUGUUUGAUAU | | | | | CCCGGGAGGU | |
| 1613294 | 1613292 | AUCACCUUGCUC | 619 | 2260 | 2281 | 1613293 | AGUUGACCUGA | 659 |
| | | AGGUCAACUGG | | | | | GCAAGGUGAU | |
| 1613297 | 1613295 | AAGCCACACUUG | 620 | 2275 | 2296 | 1613296 | GGUGACCUCCA | 660 |
| | | GAGGUCACCUU | | | | | AGUGUGGCUU | |
| 1613303 | 1613301 | ACUCCUGGUUUA | 621 | 2305 | 2326 | 1613302 | CAUCCAUCAUA | 661 |
| | | UGAUGGAUGUU | | | | | AACCAGGAGU | |
| 1613306 | 1613304 | AACCUGGCCACC | 622 | 2315 | 2336 | 1613305 | AAACCAGGAGG | 662 |
| | | UCCUGGUUUAU | | | | | UGGCCAGGUU | |
| 1613309 | 1613307 | AUCAGAUUUUAC | 623 | 2330 | 2351 | 1613308 | CAGGUGGAAGU | 663 |
| | | UUCCACCUGGC | | | | | AAAAUCUGAU | |
| 1613312 | 1613310 | AUUGAAGUCAAG | 624 | 2345 | 2366 | 1613311 | UCUGAGAAGCU | 664 |
| | | CUUCUCAGAUU | | | | | UGACUUCAAU | |
| 1613315 | 1613313 | AGACUGGACUCU | 625 | 2360 | 2381 | 1613314 | UUCAAGGACAG | 665 |
| | | GUCCUUGAAGU | | | | | AGUCCAGUCU | |
| 1613327 | 1613322 | AAGGGACCCAAU | 626 | 2375 | 2396 | 1613323 | CAGUCGAAGAU | 666 |
| | | CUUCGACUGGA | | | | | UGGGUCCCUU | |
| 1613330 | 1613328 | AUGGGUGAUAUU | 627 | 2390 | 2411 | 1613329 | UCCCUGGACAA | 667 |
| | | GUCCAGGGACC | | | | | UAUCACCCAU | |
| 1613333 | 1613331 | ACCAGGGACGUG | 628 | 2399 | 2420 | 1613332 | AAUAUCACCCA | 668 |
| | | GGUGAUAUUGU | | | | | CGUCCCUGGU | |
| 1613336 | 1613334 | AUUUUUAUUUCC | 629 | 2414 | 2435 | 1613335 | CCUGGCGGAGG | 669 |
| | | UCCGCCAGGGA | | | | | AAAUAAAAAU | |
| 1613339 | 1613337 | AUUGUGGGUUUC | 630 | 2429 | 2450 | 1613338 | AAAAAGAUUGA | 670 |
| | | AAUCUUUUUAU | | | | | AACCCACAAU | |
| 1613342 | 1613340 | ACGGAAGGUCAG | 631 | 2441 | 2462 | 1613341 | ACCCACAAGCU | 671 |
| | | CUUGUGGGUUU | | | | | GACCUUCCGU | |
| 1613348 | 1613346 | AUGGUCUGUCUU | 632 | 2468 | 2489 | 1613347 | GCCAAAGCCAA | 672 |
| | | GGCUUUGGCGU | | | | | GACAGACCAU | |
| 1613354 | 1613352 | ACAGACACCACU | 633 | 2506 | 2527 | 1613353 | CAAGUCGCCAG | 673 |
| | | GGCGACUUGUA | | | | | UGGUGUCUGU | |
| 1613360 | 1613358 | AGGUGGAGGAGA | 634 | 2547 | 2568 | 1613359 | UCAGCAAUGUC | 674 |
| | | CAUUGCUGAGA | | | | | UCCUCCACCU | |
| 1613366 | 1613364 | AAGUCUACCAUG | 635 | 2569 | 2590 | 1613365 | CAGCAUCGACA | 675 |
| | | UCGAUGCUGCC | | | | | UGGUAGACUU | |
| 1613375 | 1613373 | AGGCCUGAUCAC | 636 | 2638 | 2659 | 1613374 | GCAGGGUUUGU | 676 |
| | | AAACCCUGCUU | | | | | GAUCAGGCCU | |
| 1613381 | 1613379 | AAUUCUCUCCUC | 637 | 2673 | 2694 | 1613380 | AAUUGUGGAGA | 677 |
| | | UCCACAAUUAU | | | | | GGAGAGAAUU | |
| 1613387 | 1613385 | AUCAUUAUUCUU | 638 | 2703 | 2724 | 1613386 | GGAAAAAAAAA | 678 |
| | | UUUUUUUCCAC | | | | | GAAUAAUGAU | |
| 1613390 | 1613388 | AGGGGGCCGGGU | 639 | 2713 | 2734 | 1613389 | AGAAUAAUGAC | 679 |
| | | CAUUAUUCUUU | | | | | CCGGCCCCCU | |
| 1613402 | 1613400 | AGAGCCAAAGCC | 640 | 2793 | 2814 | 1613401 | UUGUCACUCGG | 680 |
| | | GAGUGACAAAA | | | | | CUUUGGCUCU | |
| 1613405 | 1613403 | AUGAUUUUGAAG | 641 | 2808 | 2829 | 1613404 | GGCUCGGGACU | 681 |
| | | UCCCGAGCCAA | | | | | UCAAAAUCAU | |
| 1613408 | 1613406 | AUCUUACUCCCA | 642 | 2823 | 2844 | 1613407 | AAUCAGUGAUG | 682 |
| | | UCACUGAUUUU | | | | | GGAGUAAGAU | |
| 1613411 | 1613409 | AAAAGAUGAAAU | 643 | 2838 | 2859 | 1613410 | UAAGAGCAAAU | 683 |
| | | UUGCUCUUACU | | | | | UUCAUCUUUU | |
| 1613414 | 1613412 | ACACCCAUCAAU | 644 | 2853 | 2874 | 1613413 | UCUUUCCAAAU | 684 |
| | | UUGGAAAGAUG | | | | | UGAUGGGUGU | |
| 1613423 | 1613421 | ACAUGUUUUUGA | 645 | 2895 | 2916 | 1613422 | AAAAAACAUUC | 685 |
| | | AUGUUUUUUUU | | | | | AAAAACAUGU | |
| 1613432 | 1613430 | AAAAAAAGAAUC | 646 | 2940 | 2961 | 1613431 | AUUCCUUUUGA | 686 |
| | | AAAAGGAAUUG | | | | | UUCUUUUUUU | |
| 1613447 | 1613445 | ACAGUCCCUUGA | 647 | 3011 | 3032 | 1613446 | UGGGGGAUUUC | 687 |
| | | AAUCCCCCAGA | | | | | AAGGGACUGU | |
| 1613456 | 1613454 | AUUUCAAAUCCU | 648 | 3082 | 3103 | 1613455 | CAGCAACAAAG | 688 |
| | | UUGUUGCUGCC | | | | | GAUUUGAAAU | |
| 1613459 | 1613457 | ACACGAACACAC | 649 | 3097 | 3118 | 1613458 | UGAAACUUGGU | 689 |
| | | CAAGUUUCAAA | | | | | GUGUUCGUGU | |
| 1613462 | 1613460 | AUGUGGCUCCAC | 650 | 3105 | 3126 | 1613461 | GGUGUGUUCGU | 690 |
| | | GAACACACCAA | | | | | GGAGCCACAU | |

TABLE 10
RNAi compounds targeting human MAPT, SEQ ID NO: 1

| | | | | SEQ ID | SEQ ID | | | |
|---|---|---|---|---|---|---|---|---|
| | | | | NO: 1 | NO: 1 | | | |
| | Anti- | Antisense | SEQ | Antisense | Antisense | | Sense | SEQ |
| Compound | sense | Sequence | ID | Start | Stop | Sense | Sequence | ID |
| Number | ID | (5′ to 3′) | NO. | Site | Site | ID | (5′ to 3′) | NO. |
| 1612982 | 1612980 | AGUUCAAAGUUC | 691 | 125 | 146 | 1612981 | CUAUCAGGUGA | 722 |
| | | ACCUGAUAGUC | | | | | ACUUUGAACU | |
| 1612985 | 1612983 | AGGCUCAGCCAU | 692 | 140 | 161 | 1612984 | UGAACCAGGAU | 723 |
| | | CCUGGUUCAAA | | | | | GGCUGAGCCU | |
| 1612991 | 1612989 | AUCCCAGCGUGA | 693 | 178 | 199 | 1612990 | GAUGGAAGAUC | 724 |
| | | UCUUCCAUCAC | | | | | ACGCUGGGAU | |
| 1612994 | 1612992 | AUACGUCCCAGC | 694 | 182 | 203 | 1612993 | GAAGAUCACGC | 725 |
| | | GUGAUCUUCCA | | | | | UGGGACGUAU | |
| 1613000 | 1612998 | AUGUAGCCCCCC | 695 | 217 | 238 | 1612999 | GAAAGAUCAGG | 726 |
| | | UGAUCUUUCCU | | | | | GGGGCUACAU | |
| 1613009 | 1613007 | AUCCGUGUCACC | 696 | 248 | 269 | 1613008 | GACCAAGAGGG | 727 |
| | | CUCUUGGUCUU | | | | | UGACACGGAU | |
| 1613015 | 1613013 | AGUCUGCAGGGG | 697 | 278 | 299 | 1613014 | AAAGAAUCUCC | 728 |
| | | AGAUUCUUUCA | | | | | CCUGCAGACU | |
| 1613018 | 1613016 | AGGGUCUGCAGG | 698 | 280 | 301 | 1613017 | AGAAUCUCCCCU | 729 |
| | | GGAGAUUCUUU | | | | | GCAGACCCU | |
| 1613024 | 1613022 | AUUUCAGAGCCC | 699 | 316 | 337 | 1613023 | UGAGGAACCGG | 730 |
| | | GGUUCCUCAGA | | | | | GCUCUGAAAU | |
| 1613027 | 1613025 | AUCUUAGCAUCA | 700 | 331 | 352 | 1613026 | UGAAACCUCUG | 731 |
| | | GAGGUUUCAGA | | | | | AUGCUAAGAU | |
| 1613033 | 1613031 | ACUGCUUCUUCA | 701 | 361 | 382 | 1613032 | AGCGGAAGCUG | 732 |
| | | GCUUCCGCUGU | | | | | AAGAAGCAGU | |
| 1613036 | 1613034 | AGGUGUCUCCAA | 702 | 375 | 396 | 1613035 | AAGCAGGCAUU | 733 |
| | | UGCCUGCUUCU | | | | | GGAGACACCU | |
| 1613048 | 1613046 | ACCCGGAACUCU | 703 | 434 | 455 | 1613047 | GAGGAGUUGAG | 734 |
| | | CAACUCCUCUU | | | | | AGUUCCGGGU | |
| 1613054 | 1613052 | AGACGUGGGCGC | 704 | 489 | 510 | 1613053 | AUGAGAUUAGC | 735 |
| | | UAAUCUCAUUG | | | | | GCCCACGUCU | |
| 1613057 | 1613055 | AUGGACGUGGGC | 705 | 491 | 512 | 1613056 | GAGAUUAGCGC | 736 |
| | | GCUAAUCUCAU | | | | | CCACGUCCAU | |
| 1613063 | 1613061 | AACGGGAGCUUC | 706 | 563 | 584 | 1613062 | AAAGAGCCAGA | 737 |
| | | UGGCUCUUUCU | | | | | AGCUCCCGUU | |
| 1613069 | 1613067 | ACUUUUUGUCCC | 707 | 661 | 682 | 1613068 | CCUGGAGUGGG | 738 |
| | | CACUCCAGGGA | | | | | GACAAAAAGU | |
| 1613090 | 1613088 | AUGCAGGUCUCC | 708 | 944 | 965 | 1613089 | CAGCUUCUAGG | 739 |
| | | UAGAAGCUGGU | | | | | AGACCUGCAU | |
| 1613093 | 1613091 | AUCCUGGUGCAG | 709 | 950 | 971 | 1613092 | CUAGGAGACCU | 740 |
| | | GUCUCCUAGAA | | | | | GCACCAGGAU | |
| 1613108 | 1613106 | AUGGAAACUUUG | 710 | 1183 | 1204 | 1613107 | UUUCCUCUCCAA | 741 |
| | | GAGAGGAAAUC | | | | | AGUUUCCAU | |
| 1613111 | 1613109 | AAGGCUGGGAUC | 711 | 1198 | 1219 | 1613110 | UUCCACAGAGA | 742 |
| | | UCUGUGGAAAC | | | | | UCCCAGCCUU | |
| 1613123 | 1613121 | AUUCUGCACGUU | 712 | 1292 | 1313 | 1613122 | AUCACACCCAAC | 743 |
| | | GGGUGUGAUUU | | | | | GUGCAGAAU | |
| 1613132 | 1613130 | AUGGAAAUGCAG | 713 | 1338 | 1359 | 1613131 | UGGGAAGGGCU | 744 |
| | | CCCUUCCCAAA | | | | | GCAUUUCCAU | |
| 1613135 | 1613133 | ACUGGAAAUGCA | 714 | 1339 | 1360 | 1613134 | GGGAAGGGCUG | 745 |
| | | GCCCUUCCCAA | | | | | CAUUUCCAGU | |
| 1613141 | 1613139 | AAAGGUCAGCCU | 715 | 1407 | 1428 | 1613140 | ACACAAAAGAG | 746 |
| | | CUUUUGUGUCC | | | | | GCUGACCUUU | |
| 1613147 | 1613145 | AAGCAGCAGGCU | 716 | 1437 | 1458 | 1613146 | CUGAAAAGCAG | 747 |
| | | GCUUUUCAGAG | | | | | CCUGCUGCUU | |
| 1613150 | 1613148 | AAGCAGCAGCAG | 717 | 1440 | 1461 | 1613149 | AAAAGCAGCCU | 748 |
| | | GCUGCUUUUCA | | | | | GCUGCUGCUU | |
| 1613159 | 1613157 | ACCGUCUUUGCU | 718 | 1508 | 1529 | 1613158 | GUCAGUAAAAG | 749 |
| | | UUUACUGACCA | | | | | CAAAGACGGU | |
| 1613162 | 1613160 | AUCAUCGCUUCC | 719 | 1523 | 1544 | 1613161 | GACGGGACUGG | 750 |
| | | AGUCCCGUCUU | | | | | AAGCGAUGAU | |
| 1613207 | 1613205 | ACAGUUCGGGAA | 720 | 1702 | 1723 | 1613206 | UUCUGUCACUU | 751 |
| | | GUGACAGAAGA | | | | | CCCGAACUGU | |
| 1613219 | 1613217 | AUGGCGAUCUUC | 721 | 1762 | 1783 | 1613218 | UGGUAAAACGA | 752 |
| | | GUUUUACCAUC | | | | | AGAUCGCCAU | |

### Example 2: Effect of RNAi Compounds on Human MAPT RNA In Vitro, Single Dose

[0572] RNAi compounds described herein above were tested for their single dose effects on MAPT RNA in vitro in cultured cells that express MAPT. The RNAi compounds were tested in a series of experiments that had the same culture conditions.

[0573] Cultured A-172 cells were treated with RNAi compound at a concentration of 15 nM by LipofectAMINE 2000, at a density of 30,000 cells per well. After a treatment period of 24 hours, total RNA was isolated from the cells and MAPT RNA levels were measured by quantitative real-time RTPCR. MAPT RNA was measured by human primer probe set RTS3104 (forward sequence AAGATTGGGTCCCTGGACAAT, designated herein as SEQ ID NO: 3; reverse sequence AGCTTGTGGGTTTCAATCTTTTTATT, designated herein as SEQ ID NO: 4; probe sequence CACCCACGTCCCTGGCGGA, designated herein as SEQ ID NO: 5). MAPT RNA levels were normalized to total RNA content, as measured by RIBOGREENK® Reduction of MAPT RNA is presented in the table below as percent MAPT RNA relative to the amount in untreated control cells (% UTC).

[0574] Each separate experiment described in this example is presented in a separate table. The values marked with a “T” indicate that the RNAi compound is complementary to the amplicon region of the primer probe set.

TABLE 11
Reduction of MAPT RNA by RNAi compounds
that target human MAPT nucleic acid

| Compound | MAPT |
|---|---|
| Number | (% UTC) |
| 1612982 | 14 |
| 1612982 | 17 |
| 1612985 | 86 |
| 1612988 | 68 |
| 1612991 | 122 |
| 1612994 | 30 |
| 1612997 | 118 |
| 1613000 | 129 |
| 1613006 | 84 |
| 1613009 | 22 |
| 1613015 | 120 |
| 1613018 | 89 |
| 1613024 | 98 |
| 1613030 | 113 |
| 1613036 | 72 |
| 1613051 | 135 |
| 1613090 | 110 |
| 1613108 | 90 |
| 1613114 | 112 |
| 1613162 | 106 |
| 1613219 | 14 |
| 1613243 | 96 |
| 1613246 | 91 |
| 1613264 | 116 |
| 1613270 | 102 |
| 1613291 | 117 |
| 1613294 | 82 |
| 1613330 | 118† |
| 1613348 | 106 |
| 1613375 | 103 |
| 1613387 | 121 |
| 1613393 | 116 |
| 1613417 | 94 |
| 1613435 | 125 |
| 1613438 | 94 |
| 1613456 | 109 |
| 1613465 | 72 |
| 1613468 | 61 |
| 1613474 | 120 |
| 1613477 | 112 |
| 1613483 | 126 |
| 1613504 | 60 |
| 1613525 | 95 |
| 1613549 | 78 |
| 1613573 | 79 |
| 1613585 | 123 |
| 1613606 | 98 |
| 1613618 | 94 |
| 1613633 | 92 |
| 1613642 | 97 |
| 1613645 | 80 |
| 1613651 | 114 |
| 1613681 | 78 |
| 1613702 | 120 |
| 1613708 | 107 |
| 1613723 | 72 |
| 1613729 | 113 |
| 1613732 | 104 |
| 1613741 | 105 |
| 1613777 | 109 |
| 1613780 | 109 |
| 1613840 | 110 |
| 1613864 | 121 |
| 1613867 | 127 |
| 1613873 | 93 |
| 1613924 | 123 |
| 1613927 | 108 |
| 1613942 | 111 |
| 1613963 | 112 |
| 1613972 | 106 |
| 1613978 | 100 |
| 1613990 | 101 |
| 1614005 | 95 |
| 1614017 | 114 |
| 1614020 | 118 |
| 1614038 | 94 |
| 1614077 | 108 |
| 1614143 | 89 |

TABLE 12
Reduction of MAPT RNA by RNAi compounds
that target human MAPT nucleic acid

| Compound | MAPT |
|---|---|
| Number | (% UTC) |
| 1612979 | 52 |
| 1612982 | 13 |
| 1613003 | 40 |
| 1613009 | 17 |
| 1613012 | 104 |
| 1613021 | 76 |
| 1613039 | 53 |
| 1613042 | 96 |
| 1613066 | 109 |
| 1613072 | 80 |
| 1613078 | 111 |
| 1613096 | 83 |
| 1613120 | 73 |
| 1613126 | 91 |
| 1613129 | 107 |
| 1613138 | 104 |
| 1613144 | 83 |
| 1613153 | 110 |
| 1613165 | 50 |
| 1613171 | 91 |
| 1613183 | 105 |
| 1613192 | 88 |
| 1613195 | 96 |
| 1613198 | 110 |
| 1613201 | 128 |
| 1613210 | 110 |
| 1613213 | 95 |
| 1613216 | 95 |
| 1613225 | 84 |
| 1613231 | 94 |
| 1613255 | 100 |
| 1613261 | 103 |
| 1613273 | 82 |
| 1613279 | 109 |
| 1613300 | 83 |
| 1613345 | 115† |
| 1613351 | 105 |
| 1613357 | 105 |
| 1613369 | 99 |
| 1613384 | 107 |
| 1613399 | 86 |
| 1613420 | 106 |
| 1613450 | 95 |
| 1613453 | 119 |
| 1613492 | 89 |
| 1613513 | 105 |
| 1613519 | 73 |
| 1613576 | 86 |
| 1613594 | 88 |
| 1613630 | 99 |
| 1613636 | 79 |
| 1613639 | 95 |
| 1613648 | 118 |
| 1613660 | 88 |
| 1613687 | 52 |
| 1613690 | 51 |
| 1613714 | 77 |
| 1613726 | 101 |
| 1613750 | 95 |
| 1613753 | 88 |
| 1613762 | 104 |
| 1613771 | 71 |
| 1613795 | 85 |
| 1613804 | 112 |
| 1613807 | 96 |
| 1613813 | 113 |
| 1613816 | 100 |
| 1613834 | 91 |
| 1613846 | 78 |
| 1613876 | 85 |
| 1613912 | 102 |
| 1613918 | 110 |
| 1613966 | 72 |
| 1613996 | 81 |
| 1613999 | 89 |
| 1614035 | 99 |
| 1614149 | 104 |
| 1614173 | 98 |
| 1614191 | 107 |

TABLE 13
Reduction of MAPT RNA by RNAi compounds
that target human MAPT nucleic acid

| | MAPT |
|---|---|
| Compound | (% |
| Number | UTC) |
| 1612982 | 14 |
| 1613009 | 18 |
| 1613045 | 83 |
| 1613060 | 92 |
| 1613075 | 98 |
| 1613081 | 102 |
| 1613084 | 105 |
| 1613087 | 100 |
| 1613102 | 99 |
| 1613105 | 83 |
| 1613117 | 94 |
| 1613156 | 56 |
| 1613168 | 93 |
| 1613174 | 95 |
| 1613189 | 111 |
| 1613204 | 102 |
| 1613249 | 110 |
| 1613252 | 84 |
| 1613288 | 97 |
| 1613378 | 108 |
| 1613396 | 84 |
| 1613426 | 106 |
| 1613429 | 109 |
| 1613441 | 90 |
| 1613444 | 115 |
| 1613486 | 113 |
| 1613495 | 62 |
| 1613501 | 80 |
| 1613510 | 127 |
| 1613522 | 65 |
| 1613531 | 58 |
| 1613540 | 93 |
| 1613543 | 102 |
| 1613546 | 103 |
| 1613558 | 94 |
| 1613564 | 99 |
| 1613588 | 125 |
| 1613597 | 51 |
| 1613600 | 67 |
| 1613612 | 88 |
| 1613624 | 103 |
| 1613654 | 99 |
| 1613663 | 68 |
| 1613675 | 70 |
| 1613678 | 54 |
| 1613699 | 51 |
| 1613705 | 91 |
| 1613717 | 92 |
| 1613735 | 81 |
| 1613738 | 91 |
| 1613744 | 105 |
| 1613747 | 84 |
| 1613759 | 103 |
| 1613822 | 91 |
| 1613831 | 92 |
| 1613837 | 94 |
| 1613855 | 97 |
| 1613858 | 93 |
| 1613870 | 97 |
| 1613879 | 99 |
| 1613897 | 77 |
| 1613945 | 78 |
| 1613951 | 93 |
| 1613975 | 96 |
| 1613987 | 102 |
| 1614023 | 105 |
| 1614026 | 94 |
| 1614140 | 95 |
| 1614158 | 115 |
| 1614164 | 118 |
| 1614176 | 105 |
| 1614182 | 117 |
| 1614188 | 103 |
| 1614194 | 94 |

TABLE 14
Reduction of MAPT RNA by RNAi compounds
that target human MAPT nucleic acid

| | MAPT |
|---|---|
| Compound | (% |
| Number | UTC) |
| 1612982 | 14 |
| 1613009 | 18 |
| 1613033 | 78 |
| 1613069 | 78 |
| 1613099 | 96 |
| 1613135 | 92 |
| 1613147 | 106 |
| 1613159 | 40 |
| 1613207 | 99 |
| 1613222 | 99 |
| 1613234 | 92 |
| 1613237 | 79 |
| 1613240 | 115 |
| 1613258 | 108 |
| 1613267 | 86 |
| 1613282 | 104 |
| 1613303 | 97 |
| 1613306 | 93 |
| 1613309 | 101 |
| 1613315 | 115 |
| 1613327 | 112† |
| 1613354 | 89 |
| 1613360 | 103 |
| 1613363 | 98 |
| 1613372 | 98 |
| 1613381 | 100 |
| 1613390 | 102 |
| 1613402 | 130 |
| 1613414 | 78 |
| 1613423 | 80 |
| 1613447 | 97 |
| 1613459 | 104 |
| 1613471 | 104 |
| 1613516 | 61 |
| 1613528 | 88 |
| 1613552 | 74 |
| 1613555 | 81 |
| 1613567 | 83 |
| 1613582 | 110 |
| 1613591 | 102 |
| 1613609 | 112 |
| 1613615 | 65 |
| 1613666 | 92 |
| 1613669 | 56 |
| 1613684 | 58 |
| 1613696 | 54 |
| 1613756 | 75 |
| 1613768 | 81 |
| 1613786 | 73 |
| 1613789 | 113 |
| 1613825 | 100 |
| 1613843 | 82 |
| 1613861 | 90 |
| 1613891 | 101 |
| 1613900 | 89 |
| 1613903 | 102 |
| 1613930 | 88 |
| 1613933 | 71 |
| 1613936 | 112 |
| 1613948 | 101 |
| 1613954 | 113 |
| 1613957 | 89 |
| 1613960 | 105 |
| 1613969 | 91 |
| 1613981 | 88 |
| 1613993 | 89 |
| 1614029 | 98 |
| 1614032 | 98 |
| 1614110 | 73 |
| 1614131 | 67 |
| 1614137 | 85 |
| 1614146 | 94 |
| 1614152 | 97 |
| 1614155 | 93 |
| 1614167 | 79 |
| 1614170 | 105 |
| 1614185 | 91 |

TABLE 15
Reduction of MAPT RNA by RNAi compounds
that target human MAPT nucleic acid

| Compound | MAPT |
|---|---|
| Number | (% UTC) |
| 1612982 | 12 |
| 1613009 | 16 |
| 1613027 | 72 |
| 1613048 | 80 |
| 1613054 | 90 |
| 1613057 | 104 |
| 1613063 | 121 |
| 1613093 | 106 |
| 1613111 | 97 |
| 1613123 | 134 |
| 1613132 | 110 |
| 1613141 | 117 |
| 1613150 | 136 |
| 1613228 | 107 |
| 1613276 | 94 |
| 1613285 | 124 |
| 1613297 | 102 |
| 1613312 | 128 |
| 1613333 | 117† |
| 1613336 | 100† |
| 1613339 | 117† |
| 1613342 | 109† |
| 1613366 | 107 |
| 1613405 | 87 |
| 1613408 | 104 |
| 1613411 | 91 |
| 1613432 | 93 |
| 1613462 | 111 |
| 1613480 | 110 |
| 1613489 | 108 |
| 1613498 | 101 |
| 1613507 | 62 |
| 1613534 | 87 |
| 1613537 | 115 |
| 1613561 | 102 |
| 1613570 | 85 |
| 1613579 | 75 |
| 1613603 | 106 |
| 1613621 | 119 |
| 1613627 | 86 |
| 1613657 | 107 |
| 1613672 | 118 |
| 1613693 | 63 |
| 1613711 | 96 |
| 1613720 | 125 |
| 1613765 | 96 |
| 1613774 | 89 |
| 1613783 | 120 |
| 1613792 | 122 |
| 1613798 | 108 |
| 1613801 | 116 |
| 1613810 | 99 |
| 1613819 | 121 |
| 1613828 | 101 |
| 1613849 | 136 |
| 1613852 | 125 |
| 1613894 | 88 |
| 1613906 | 101 |
| 1613909 | 65 |
| 1613915 | 138 |
| 1613921 | 106 |
| 1613939 | 71 |
| 1613984 | 110 |
| 1614002 | 87 |
| 1614008 | 106 |
| 1614011 | 120 |
| 1614014 | 98 |
| 1614041 | 76 |
| 1614054 | 152 |
| 1614134 | 94 |
| 1614161 | 110 |
| 1614179 | 99 |

### Example 3: Dose-Dependent Inhibition of Human MAPT in A-172 Cells by RNAi Compounds

[0575] RNAi compounds selected from the example above were tested at various doses in A-172 cells. A-172 cells plated at a density of 30,000 cells per well were treated using LipofectAMINE 2000 with various concentrations of RNAi compounds as specified in the tables below. After a treatment period of approximately 24 hours, total RNA was isolated from the cells and MAPT RNA levels were measured by quantitative real-time RTPCR. Human MAPT primer-probe set RTS3104 (described herein above) was used to measure RNA levels as described above. MAPT RNA levels were normalized to total RNA content, as measured by RIBOGREEN®. Reduction of MAPT RNA is presented in the table below as percent MAPT RNA, relative to untreated control cells (% UTC).

[0576] The half maximal inhibitory concentration (IC₅₀) of each RNAi compound was calculated using a linear regression on a log/linear plot of the data in Excel or GraphPad Prism (version 9.2.0) and is also presented in the table below. Compound No. 623782, a 5-10-5 MOE gapmer modified oligonucleotide previously described in WO 2015/010135, was added as a positive control.

TABLE 16
Dose-dependent reduction of human MAPT
RNA in A-172 cells by RNAi compounds

| Compound | MAPT RNA (% UTC) | | | | | IC₅₀ |
|---|---|---|---|---|---|---|
| Number | 0.008 nM | 0.04 nM | 0.2 nM | 1 nM | 5 nM | (nM) |
| 623782 | 85 | 59 | 29 | 10 | 5 | 0.07 |
| 1613156 | 99 | 100 | 94 | 72 | 57 | >5 |
| 1613495 | 97 | 83 | 96 | 85 | 83 | >5 |
| 1613501 | 100 | 94 | 87 | 78 | 49 | 5.11 |
| 1613522 | 95 | 65 | 57 | 58 | 64 | >5 |
| 1613531 | 102 | 83 | 101 | 98 | 80 | >5 |
| 1613597 | 101 | 77 | 62 | 65 | 67 | >5 |
| 1613600 | 104 | 96 | 83 | 66 | 65 | >5 |
| 1613663 | 94 | 91 | 77 | 60 | 55 | >5 |
| 1613675 | 92 | 94 | 90 | 73 | 68 | >5 |
| 1613678 | 91 | 74 | 62 | 56 | 69 | >5 |
| 1613699 | 83 | 62 | 61 | 65 | 66 | >5 |
| 1613897 | 105 | 100 | 103 | 104 | 92 | >5 |
| 1613945 | 96 | 94 | 94 | 97 | 93 | >5 |

TABLE 17
Dose-dependent reduction of human MAPT
RNA in A-172 cells by RNAi compounds

| Compound | MAPT RNA (% UTC) | | | | | IC₅₀ |
|---|---|---|---|---|---|---|
| Number | 0.008 nM | 0.04 nM | 0.2 nM | 1 nM | 5 nM | (nM) |
| 623782 | 90 | 67 | 28 | 10 | 5 | 0.08 |
| 1613159 | 113 | 110 | 106 | 69 | 57 | >5 |
| 1613423 | 103 | 102 | 101 | 105 | 103 | >5 |
| 1613516 | 96 | 84 | 66 | 65 | 72 | >5 |
| 1613552 | 96 | 87 | 82 | 68 | 62 | >5 |
| 1613615 | 92 | 79 | 60 | 60 | 73 | >5 |
| 1613669 | 96 | 71 | 56 | 51 | 67 | >5 |
| 1613684 | 98 | 91 | 73 | 67 | 72 | >5 |
| 1613696 | 81 | 58 | 50 | 55 | 59 | 8.36 |
| 1613756 | 103 | 101 | 105 | 105 | 94 | >5 |
| 1613786 | 96 | 96 | 103 | 100 | 91 | >5 |
| 1613933 | 111 | 115 | 106 | 101 | 97 | >5 |
| 1614110 | 106 | 107 | 108 | 110 | 110 | >5 |
| 1614131 | 101 | 104 | 102 | 100 | 97 | >5 |
| 1614167 | 96 | 101 | 104 | 102 | 101 | >5 |

TABLE 18
Dose-dependent reduction of human MAPT
RNA in A-172 cells by RNAi compounds

| Compound | MAPT RNA (% UTC) | | | | | IC₅₀ |
|---|---|---|---|---|---|---|
| Number | 0.008 nM | 0.04 nM | 0.2 nM | 1 nM | 5 nM | (nM) |
| 623782 | 91 | 64 | 26 | 9 | 6 | 0.07 |
| 1613027 | 95 | 88 | 71 | 64 | 62 | >5 |
| 1613048 | 123 | 102 | 90 | 84 | 78 | >5 |
| 1613405 | 100 | 104 | 106 | 101 | 89 | >5 |
| 1613507 | 103 | 85 | 72 | 63 | 66 | >5 |
| 1613534 | 97 | 100 | 96 | 74 | 76 | >5 |
| 1613570 | 99 | 92 | 104 | 88 | 82 | >5 |
| 1613579 | 99 | 92 | 73 | 65 | 65 | >5 |
| 1613627 | 101 | 98 | 96 | 94 | 88 | >5 |
| 1613693 | 104 | 99 | 97 | 85 | 75 | >5 |
| 1613894 | 97 | 101 | 101 | 92 | 72 | >5 |
| 1613909 | 107 | 97 | 107 | 113 | 110 | >5 |
| 1613939 | 115 | 96 | 87 | 79 | 84 | >5 |
| 1614041 | 105 | 101 | 111 | 115 | 128 | >5 |

TABLE 19
Dose-dependent reduction of human MAPT
RNA in A-172 cells by RNAi compounds

| Compound | MAPT RNA (% UTC) | | | | | IC₅₀ |
|---|---|---|---|---|---|---|
| Number | 0.008 nM | 0.04 nM | 0.2 nM | 1 nM | 5 nM | (nM) |
| 623782 | 88 | 64 | 29 | 9 | 6 | 0.08 |
| 1612982 | 95 | 74 | 40 | 24 | 26 | 0.19 |
| 1612988 | 94 | 89 | 81 | 53 | 32 | 1.42 |
| 1612994 | 84 | 50 | 29 | 19 | 24 | 0.06 |
| 1613009 | 94 | 73 | 40 | 25 | 29 | 0.20 |
| 1613036 | 99 | 81 | 72 | 53 | 45 | 2.07 |
| 1613219 | 81 | 46 | 24 | 23 | 22 | 0.05 |
| 1613465 | 93 | 96 | 94 | 73 | 56 | >5 |
| 1613468 | 94 | 92 | 71 | 61 | 63 | >5 |
| 1613504 | 96 | 79 | 62 | 53 | 63 | >5 |
| 1613549 | 99 | 90 | 91 | 73 | 68 | >5 |
| 1613573 | 99 | 97 | 83 | 65 | 67 | >5 |
| 1613645 | 94 | 96 | 97 | 95 | 92 | >5 |
| 1613681 | 99 | 101 | 102 | 98 | 79 | >5 |
| 1613723 | 108 | 110 | 115 | 117 | 125 | >5 |

TABLE 20
Dose-dependent reduction of human MAPT
RNA in A-172 cells by RNAi compounds

| Compound | MAPT RNA (% UTC) | | | | | IC₅₀ |
|---|---|---|---|---|---|---|
| Number | 0.008 nM | 0.04 nM | 0.2 nM | 1 nM | 5 nM | (nM) |
| 623782 | 85 | 56 | 29 | 10 | 6 | 0.06 |
| 1612979 | 114 | 105 | 84 | 47 | 39 | 1.61 |
| 1613003 | 115 | 102 | 71 | 45 | 36 | 1.18 |
| 1613021 | 103 | 107 | 104 | 75 | 58 | >5 |
| 1613039 | 98 | 102 | 96 | 57 | 39 | 2.26 |
| 1613120 | 108 | 92 | 85 | 71 | 77 | >5 |
| 1613165 | 115 | 104 | 101 | 76 | 43 | 3.63 |
| 1613519 | 100 | 98 | 81 | 64 | 60 | >5 |
| 1613636 | 97 | 100 | 96 | 87 | 78 | >5 |
| 1613687 | 103 | 75 | 58 | 59 | 57 | >5 |
| 1613690 | 86 | 64 | 52 | 50 | 56 | 2.64 |
| 1613714 | 98 | 105 | 117 | 105 | 111 | >5 |
| 1613771 | 104 | 106 | 104 | 112 | 117 | >5 |
| 1613846 | 97 | 110 | 105 | 95 | 107 | >5 |
| 1613966 | 109 | 102 | 105 | 111 | 106 | >5 |

### Example 4: Design of RNAi Compounds with Antisense RNAi Oligonucleotides Complementary to a Human MAPT Nucleic Acid

[0577] RNAi compounds comprising antisense RNAi oligonucleotides complementary to a human MAPT nucleic acid, and sense RNAi oligonucleotides complementary to the antisense RNAi oligonucleotides were designed as follows.

[0578] The RNAi compounds in the tables below consist of an antisense RNAi oligonucleotide and a sense RNAi oligonucleotide. In each case, the antisense RNAi oligonucleotide is 23 nucleosides in length; has a sugar motif (from 5′ to 3′) of: yfyyyfyyyyyyyfyfyyyyyyy, wherein each “y” represents a 2′-O-methylribosyl sugar, and each “f” represents a 2′-fluororibosyl sugar; and has an internucleoside linkage motif (from 5′ to 3′) of: ssooooooooooooooooooss, wherein each “o” represents a phosphodiester internucleoside linkage, and each “s” represents a phosphorothioate internucleoside linkage. Each antisense RNAi oligonucleotide has a terminal phosphate at the 5′ end. The sense RNAi oligonucleotide in each case is 21 nucleosides in length; has a sugar motif (from 5′ to 3′) of yyyyyyfyfffyyyyyyyyyy, wherein each “y” represents a 2′-O-methylribosyl sugar, and each “f” represents a 2′-fluororibosyl sugar; and has an internucleoside linkage motif (from 5′ to 3′) of ssooooooooooooooooss, wherein each “o” represents a phosphodiester internucleoside linkage, and each “s” represents a phosphorothioate internucleoside linkage. Each antisense RNAi oligonucleotide in the table below is complementary to the target nucleic acid (MAPT), and each sense RNAi oligonucleotide is complementary to the first of the 21 nucleosides of the antisense RNAi oligonucleotide (from 5′ to 3′) wherein the last two 3′-nucleosides of the antisense RNAi oligonucleotides are not paired with the sense RNAi oligonucleotide (are overhanging nucleosides).

[0579] “Start site” indicates the 5′-most nucleoside to which the antisense RNAi oligonucleotide is complementary target nucleic acid sequence. “Stop site” indicates the 3′-most nucleoside to which the antisense RNAi oligonucleotide is complementary in the target nucleic acid sequence. Each antisense RNAi oligonucleotide listed in the tables below is 100% complementary to SEQ ID NO: 1 (described herein above).

TABLE 21
RNAi compounds targeting human MAPT, SEQ ID NO: 1

| | | | | SEQ ID | SEQ ID | | | |
|---|---|---|---|---|---|---|---|---|
| | | | | NO: 1 | NO: 1 | | | |
| | Anti- | Antisense | SEQ | Antisense | Antisense | | Sense | SEQ |
| Compound | sense | Sequence | ID | Start | Stop | Sense | Sequence | ID |
| Number | ID | (5′ to 3′) | NO. | Site | Site | ID | (5′ to 3′) | NO. |
| 1702348 | 1702346 | UUCAAAGUUCAC | 753 | 123 | 145 | 1702347 | GACUAUCAGGU | 899 |
| | | CUGAUAGUCGA | | | | | GAACUUUGAA | |
| 1702366 | 1702364 | UGGCGGGGCUCA | 754 | 145 | 167 | 1702365 | CAGGAUGGCUG | 900 |
| | | GCCAUCCUGGU | | | | | AGCCCCGCCA | |
| 1702375 | 1702373 | UCACUUCGAACU | 755 | 159 | 181 | 1702374 | CCCGCCAGGAGU | 901 |
| | | CCUGGCGGGGC | | | | | UCGAAGUGA | |
| 1702381 | 1702379 | UCCAUCACUUCG | 330 | 163 | 185 | 1702380 | CCAGGAGUUCG | 377 |
| | | AACUCCUGGCG | | | | | AAGUGAUGGA | |
| 1702423 | 1702421 | UUUCAGGCCAGC | 756 | 260 | 282 | 1702422 | GACACGGACGC | 902 |
| | | GUCCGUGUCAC | | | | | UGGCCUGAAA | |
| 1702441 | 1702439 | UGGAGUGCUCUU | 757 | 338 | 360 | 1702440 | UCUGAUGCUAA | 903 |
| | | AGCAUCAGAGG | | | | | GAGCACUCCA | |
| 1702444 | 1702442 | UUCAGCUUCCGC | 758 | 353 | 375 | 1702443 | ACUCCAACAGCG | 904 |
| | | UGUUGGAGUGC | | | | | GAAGCUGAA | |
| 1702447 | 1702445 | UCCAAUGCCUGC | 759 | 368 | 390 | 1702446 | GCUGAAGAAGC | 905 |
| | | UUCUUCAGCUU | | | | | AGGCAUUGGA | |
| 1702453 | 1702451 | UCACGUGACCAG | 760 | 408 | 430 | 1702452 | ACGAAGCUGCU | 906 |
| | | CAGCUUCGUCU | | | | | GGUCACGUGA | |
| 1702462 | 1702460 | UCAGGCGCCUUC | 761 | 454 | 476 | 1702461 | CCGGCAGAGGA | 907 |
| | | CUCUGCCGGCC | | | | | AGGCGCCUGA | |
| 1702471 | 1702469 | UGGACGUGGGCG | 762 | 490 | 512 | 1702470 | UGAGAUUAGCG | 908 |
| | | CUAAUCUCAUU | | | | | CCCACGUCCA | |
| 1702501 | 1702499 | UCAGGCAGGAGG | 763 | 835 | 857 | 1702500 | UGGGGCUCCCCU | 909 |
| | | GGAGCCCCAGG | | | | | CCUGCCUGA | |
| 1702522 | 1702520 | UCAUCGACGUCG | 764 | 1030 | 1052 | 1702521 | UGAAGACCGCG | 910 |
| | | CGGUCUUCAUC | | | | | ACGUCGAUGA | |
| 1702528 | 1702526 | UUUGGAGAGGAA | 765 | 1175 | 1197 | 1702527 | CCUGUGGAUUU | 911 |
| | | AUCCACAGGGA | | | | | CCUCUCCAAA | |
| 1702534 | 1702532 | UGAGGCUGGGAU | 766 | 1199 | 1221 | 1702533 | UCCACAGAGAU | 912 |
| | | CUCUGUGGAAA | | | | | CCCAGCCUCA | |
| 1702537 | 1702535 | UUGGCCCGCCCU | 767 | 1231 | 1253 | 1702536 | GCCCAGUGUAG | 913 |
| | | ACACUGGGCCC | | | | | GGCGGGCCAA | |
| 1702546 | 1702544 | UCCUUCUGCACG | 768 | 1294 | 1316 | 1702545 | CACACCCAACGU | 914 |
| | | UUGGGUGUGAU | | | | | GCAGAAGGA | |
| 1702570 | 1702568 | UGCGAGCUUUGA | 769 | 1485 | 1507 | 1702569 | UCCCUCAACUCA | 915 |
| | | GUUGAGGGACC | | | | | AAGCUCGCA | |
| 1702573 | 1702571 | UGCUUUUACUGA | 770 | 1500 | 1522 | 1702572 | CUCGCAUGGUC | 916 |
| | | CCAUGCGAGCU | | | | | AGUAAAAGCA | |
| 1702576 | 1702574 | UUCCAGUCCCGU | 771 | 1515 | 1537 | 1702575 | AAAGCAAAGAC | 917 |
| | | CUUUGCUUUUA | | | | | GGGACUGGAA | |
| 1702585 | 1702583 | UUUUAGCAGAGG | 772 | 1560 | 1582 | 1702584 | CCACACGUUCCU | 918 |
| | | AACGUGUGGAU | | | | | CUGCUAAAA | |
| 1702594 | 1702592 | UGGGGUGUUUGG | 773 | 1599 | 1621 | 1702593 | GCCUUAGCCCCA | 919 |
| | | GGCUAAGGCAA | | | | | AACACCCCA | |
| 1702597 | 1702595 | UACCAGGAGUGG | 774 | 1608 | 1630 | 1702596 | CCAAACACCCCA | 920 |
| | | GGUGUUUGGGG | | | | | CUCCUGGUA | |
| 1702651 | 1702649 | UCCCCUGAUUUU | 775 | 1882 | 1904 | 1702650 | UGAACCUCCAA | 921 |
| | | GGAGGUUCACC | | | | | AAUCAGGGGA | |
| 1702678 | 1702676 | UUCCCGCCUCCCG | 776 | 2125 | 2147 | 1702677 | GCACCAGCCGGG | 922 |
| | | GCUGGUGCUU | | | | | AGGCGGGAA | |
| 1702699 | 1702697 | UUUGUAGACUAU | 777 | 2237 | 2259 | 1702698 | AGUGUGCAAAU | 923 |
| | | UUGCACACUGC | | | | | AGUCUACAAA | |
| 1702711 | 1702709 | UUUAUGAUGGAU | 778 | 2297 | 2319 | 1702710 | UUAGGCAACAU | 924 |
| | | GUUGCCUAAUG | | | | | CCAUCAUAAA | |
| 1702717 | 1702715 | UUACUUCCACCU | 779 | 2322 | 2344 | 1702716 | GAGGUGGCCAG | 925 |
| | | GGCCACCUCCU | | | | | GUGGAAGUAA | |
| 1702729 | 1702727 | UAUUGUCCAGGG | 780 | 2382 | 2404 | 1702728 | AGAUUGGGUCC | 926 |
| | | ACCCAAUCUUC | | | | | CUGGACAAUA | |
| 1702735 | 1702733 | UUCCUCCGCCAG | 781 | 2406 | 2428 | 1702734 | CCCACGUCCCUG | 927 |
| | | GGACGUGGGUG | | | | | GCGGAGGAA | |
| 1702738 | 1702736 | UUUCAAUCUUUU | 782 | 2421 | 2443 | 1702737 | GAGGAAAUAAA | 928 |
| | | UAUUUCCUCCG | | | | | AAGAUUGAAA | |
| 1702747 | 1702745 | UCUUGGCUUUGG | 783 | 2460 | 2482 | 1702746 | GCGAGAACGCC | 929 |
| | | CGUUCUCGCGG | | | | | AAAGCCAAGA | |
| 1702756 | 1702754 | UGGAGACGUGUC | 784 | 2519 | 2541 | 1702755 | GUGUCUGGGGA | 930 |
| | | CCCAGACACCA | | | | | CACGUCUCCA | |
| 1702762 | 1702760 | UGCCGGUGGAGG | 785 | 2550 | 2572 | 1702761 | GCAAUGUCUCC | 931 |
| | | AGACAUUGCUG | | | | | UCCACCGGCA | |
| 1702777 | 1702775 | UUGGCCAGGGAG | 786 | 2617 | 2639 | 1702776 | GGUGUCUGCCU | 932 |
| | | GCAGACACCUC | | | | | CCCUGGCCAA | |
| 1702792 | 1702790 | UCUUUUUUUUUC | 787 | 2695 | 2717 | 1702791 | GAGAGUGUGGA | 933 |
| | | CACACUCUCUC | | | | | AAAAAAAAGA | |
| 1702822 | 1702820 | UACUAGCCCACCC | 788 | 2860 | 2882 | 1702821 | AAAUUGAUGGG | 934 |
| | | AUCAAUUUGG | | | | | UGGGCUAGUA | |
| 1702861 | 1702859 | UCCUUUGUUGCU | 789 | 3074 | 3096 | 1702860 | GGCAGUGGCAG | 935 |
| | | GCCACUGCCUC | | | | | CAACAAAGGA | |
| 1702891 | 1702889 | UUCUCUUUUUAC | 790 | 3410 | 3432 | 1702890 | GGACAGCGGGU | 936 |
| | | CCGCUGUCCCU | | | | | AAAAAGAGAA | |
| 1702894 | 1702892 | UGCCAGCUUGCC | 791 | 3422 | 3444 | 1702893 | AAAAGAGAAGG | 937 |
| | | UUCUCUUUUUA | | | | | CAAGCUGGCA | |
| 1702900 | 1702898 | UUUUCUAAGGAG | 792 | 3458 | 3480 | 1702899 | GUGGAUGACCU | 938 |
| | | GUCAUCCACGA | | | | | CCUUAGAAAA | |
| 1702909 | 1702907 | UCAGGCCCCCUAC | 793 | 3522 | 3544 | 1702908 | CCUGCAGGGUA | 939 |
| | | CCUGCAGGGA | | | | | GGGGGCCUGA | |
| 1702915 | 1702913 | UUCAGAACUCAA | 794 | 3574 | 3596 | 1702914 | CCUGUUUUAUU | 940 |
| | | UAAAACAGGGU | | | | | GAGUUCUGAA | |
| 1702924 | 1702922 | UCCCAGGUCUGC | 795 | 3619 | 3641 | 1702923 | GGCCACUUUGC | 941 |
| | | AAAGUGGCCAA | | | | | AGACCUGGGA | |
| 1702927 | 1702925 | UGGUUAGCCCUA | 796 | 3634 | 3656 | 1702926 | CUGGGACUUUA | 942 |
| | | AAGUCCCAGGU | | | | | GGGCUAACCA | |
| 1702954 | 1702952 | UGGGCUCUCACG | 797 | 3813 | 3835 | 1702953 | GUUGUCUGCCG | 943 |
| | | GCAGACAACAG | | | | | UGAGAGCCCA | |
| 1702957 | 1702955 | UAUAGGCAGUGA | 798 | 3826 | 3848 | 1702956 | AGAGCCCAAUC | 944 |
| | | UUGGGCUCUCA | | | | | ACUGCCUAUA | |
| 1702966 | 1702964 | UGGUGAGGCUGG | 799 | 3870 | 3892 | 1702965 | CCCGAAUUCCCA | 945 |
| | | GAAUUCGGGAC | | | | | GCCUCACCA | |
| 1702969 | 1702967 | UACUGAGAAGGG | 800 | 3883 | 3905 | 1702968 | CCUCACCACCCC | 946 |
| | | GUGGUGAGGCU | | | | | UUCUCAGUA | |
| 1702975 | 1702973 | UAGGUACCUCCU | 801 | 3913 | 3935 | 1702974 | GUUGGUUGCAG | 947 |
| | | GCAACCAACCA | | | | | GAGGUACCUA | |
| 1702984 | 1702982 | UGUGCCUGGACU | 802 | 3958 | 3980 | 1702983 | GGAAGGCAAAG | 948 |
| | | UUGCCUUCCCU | | | | | UCCAGGCACA | |
| 1702987 | 1702985 | UCCCACUCUUGU | 803 | 3967 | 3989 | 1702986 | AGUCCAGGCAC | 949 |
| | | GCCUGGACUUU | | | | | AAGAGUGGGA | |
| 1702993 | 1702991 | UGAGUGGAACUG | 804 | 3996 | 4018 | 1702992 | UCUCACUCUCAG | 950 |
| | | AGAGUGAGAGG | | | | | UUCCACUCA | |
| 1703020 | 1703018 | UCCAUGUCAACA | 805 | 4123 | 4145 | 1703019 | UUUCUGCCUUG | 951 |
| | | AGGCAGAAACA | | | | | UUGACAUGGA | |
| 1703026 | 1703024 | UGGGCUCAGCAC | 806 | 4172 | 4194 | 1703025 | CCCCUUCCUGUG | 952 |
| | | AGGAAGGGGCC | | | | | CUGAGCCCA | |
| 1703038 | 1703036 | UGGCAGCUACAA | 807 | 4289 | 4311 | 1703037 | CACCCUAGCUUG | 953 |
| | | GCUAGGGUGCA | | | | | UAGCUGCCA | |
| 1703041 | 1703039 | UCUGGGAGGUUG | 808 | 4299 | 4321 | 1703040 | UGUAGCUGCCA | 954 |
| | | GCAGCUACAAG | | | | | ACCUCCCAGA | |
| 1703053 | 1703051 | UCCCCUUUGUCG | 809 | 4362 | 4384 | 1703052 | CUCCACACCCGA | 955 |
| | | GGUGUGGAGGG | | | | | CAAAGGGGA | |
| 1703083 | 1703081 | UAAACAGACAAA | 810 | 4510 | 4532 | 1703082 | GUAGUUGGAUU | 956 |
| | | UCCAACUACAA | | | | | UGUCUGUUUA | |
| 1703086 | 1703084 | UGGUGAAUCCAA | 811 | 4525 | 4547 | 1703085 | UGUUUAUGCUU | 957 |
| | | GCAUAAACAGA | | | | | GGAUUCACCA | |
| 1703092 | 1703090 | UUACAAGCAUUU | 812 | 4593 | 4615 | 1703091 | UGUAUCUUGAA | 958 |
| | | CAAGAUACAUG | | | | | AUGCUUGUAA | |
| 1703134 | 1703132 | UAGGGAAGGGGA | 813 | 4815 | 4837 | 1703133 | GCGAUGAUGUC | 959 |
| | | CAUCAUCGCUU | | | | | CCCUUCCCUA | |
| 1703158 | 1703156 | UAAGCCUCCUUU | 814 | 4939 | 4961 | 1703157 | GGCAGUCCCAA | 960 |
| | | GGGACUGCCAU | | | | | AGGAGGCUUA | |
| 1703182 | 1703180 | UGGUGGGAGGCU | 815 | 5082 | 5104 | 1703181 | GGGCAGCGCAG | 961 |
| | | GCGCUGCCCCU | | | | | CCUCCCACCA | |
| 1703191 | 1703189 | UUGGGCCUCUAG | 816 | 5148 | 5170 | 1703190 | GGAUCUGCUCU | 962 |
| | | AGCAGAUCCAG | | | | | AGAGGCCCAA | |
| 1703197 | 1703195 | UCAAGUCAUCCU | 817 | 5176 | 5198 | 1703196 | GCCUGAGGAAG | 963 |
| | | UCCUCAGGCAG | | | | | GAUGACUUGA | |
| 1703215 | 1703213 | UUUCUCAUGGCA | 818 | 5263 | 5285 | 1703214 | UCCAUCUGCUGC | 964 |
| | | GCAGAUGGAGU | | | | | CAUGAGAAA | |
| 1703227 | 1703225 | UGGGCCUGAGGC | 819 | 5321 | 5343 | 1703226 | AACUCAGCAGCC | 965 |
| | | UGCUGAGUUUC | | | | | UCAGGCCCA | |
| 1703239 | 1703237 | UACUGCCAAGUC | 820 | 5378 | 5400 | 1703238 | ACCCUGAGGGA | 966 |
| | | CCUCAGGGUUG | | | | | CUUGGCAGUA | |
| 1703263 | 1703261 | UCAGCGAACGGC | 821 | 5491 | 5513 | 1703262 | AGCCUCCCUGCC | 967 |
| | | AGGGAGGCUCU | | | | | GUUCGCUGA | |
| 1703269 | 1703267 | UUAGGAGAAUUG | 822 | 5510 | 5532 | 1703268 | GAGUCCCAGCA | 968 |
| | | CUGGGACUCAG | | | | | AUUCUCCUAA | |
| 1703272 | 1703270 | UCAGAUCCCUUC | 823 | 5525 | 5547 | 1703271 | UCCUAAGUUGA | 969 |
| | | AACUUAGGAGA | | | | | AGGGAUCUGA | |
| 1703281 | 1703279 | UAUCUCUAACCA | 824 | 5570 | 5592 | 1703280 | AUUUGGUGGUG | 970 |
| | | CCACCAAAUCU | | | | | GUUAGAGAUA | |
| 1703314 | 1703312 | UAAACCAUGAUC | 825 | 5743 | 5765 | 1703313 | CCAGCCUAAGA | 971 |
| | | UUAGGCUGGCC | | | | | UCAUGGUUUA | |
| 1703320 | 1703318 | UUUCAAUUUAUC | 826 | 5773 | 5795 | 1703319 | GUGCUGGCAGA | 972 |
| | | UGCCAGCACUG | | | | | UAAAUUGAAA | |
| 1703338 | 1703336 | UGGGAGAAGUGA | 827 | 5851 | 5873 | 1703337 | CCCCUCCCCUCA | 973 |
| | | GGGGAGGGGAG | | | | | CUUCUCCCA | |
| 1703356 | 1703354 | UCAAUUUAAAUG | 828 | 5951 | 5973 | 1703355 | CAAUAGUUCCA | 974 |
| | | GAACUAUUGAU | | | | | UUUAAAUUGA | |
| 1703368 | 1703366 | UCCCCCCAUAGCA | 829 | 6005 | 6027 | 1703367 | GCUUGUUGUGC | 975 |
| | | CAACAAGCAA | | | | | UAUGGGGGGA | |
| 1703371 | 1703369 | UCCUCCCCCCUCC | 830 | 6015 | 6037 | 1703370 | CUAUGGGGGGA | 976 |
| | | CCCCAUAGCA | | | | | GGGGGGAGGA | |
| 1703374 | 1703372 | UUAACUAUCUUA | 831 | 6032 | 6054 | 1703373 | AGGAAUGUGUA | 977 |
| | | CACAUUCCUCC | | | | | AGAUAGUUAA | |
| 1703386 | 1703384 | UCAUGAAAAGGG | 832 | 6092 | 6114 | 1703385 | GCCUCGUAACCC | 978 |
| | | UUACGAGGCAG | | | | | UUUUCAUGA | |
| 1703392 | 1703390 | UCCCUCCCUCUAG | 833 | 6120 | 6142 | 1703391 | CACAUUUGCUA | 979 |
| | | CAAAUGUGGU | | | | | GAGGGAGGGA | |
| 1703443 | 1703441 | UGGAGCCAGUGU | 834 | 6358 | 6380 | 1703442 | CCACCUCUCACA | 980 |
| | | GAGAGGUGGCA | | | | | CUGGCUCCA | |
| 1703449 | 1703447 | UCUCAGCUCCAA | 835 | 6388 | 6410 | 1703448 | CCUGUGCUUUU | 981 |
| | | AAGCACAGGCU | | | | | GGAGCUGAGA | |
| 1703461 | 1703459 | UCACCUCUGCCCU | 836 | 6458 | 6480 | 1703460 | UCGGGGCGAGG | 982 |
| | | CGCCCCGACC | | | | | GCAGAGGUGA | |
| 1703464 | 1703462 | UCUGUAGAUGGG | 837 | 6482 | 6504 | 1703463 | CCUGCGUGUCCC | 983 |
| | | ACACGCAGGUG | | | | | AUCUACAGA | |
| 1703467 | 1703465 | UUAUGAAGCUGC | 838 | 6497 | 6519 | 1703466 | UACAGACCUGC | 984 |
| | | AGGUCUGUAGA | | | | | AGCUUCAUAA | |
| 1703488 | 1703486 | UCCUGCUCAACA | 839 | 6602 | 6624 | 1703487 | AGUUUGCCAUG | 985 |
| | | UGGCAAACUCA | | | | | UUGAGCAGGA | |
| 1703503 | 1703501 | UGUCCCUCCCCCC | 840 | 6665 | 6687 | 1703502 | CUGAGGGUGGG | 986 |
| | | ACCCUCAGAA | | | | | GGGAGGGACA | |
| 1703518 | 1703516 | UGUAAAUCAUUU | 841 | 6740 | 6762 | 1703517 | UGUUUUAACAA | 987 |
| | | GUUAAAACACA | | | | | AUGAUUUACA | |
| 1703521 | 1703519 | UACAGCAACAGU | 842 | 6755 | 6777 | 1703520 | UUUACACUGAC | 988 |
| | | CAGUGUAAAUC | | | | | UGUUGCUGUA | |
| 1703524 | 1703522 | UUCCAAAUUCAC | 843 | 6770 | 6792 | 1703523 | GCUGUAAAAGU | 989 |
| | | UUUUACAGCAA | | | | | GAAUUUGGAA | |
| 1703545 | 1703543 | UCUGUGGAAACU | 844 | 1186 | 1208 | 1703544 | CCUCUCCAAAGU | 990 |
| | | UUGGAGAGGAA | | | | | UUCCACAGA | |
| 1703551 | 1703549 | UUUUACUGACCA | 845 | 1497 | 1519 | 1703550 | AAGCUCGCAUG | 991 |
| | | UGCGAGCUUUG | | | | | GUCAGUAAAA | |
| 1703557 | 1703555 | UUGGCUUUUUUG | 846 | 1534 | 1556 | 1703556 | AAGCGAUGACA | 992 |
| | | UCAUCGCUUCC | | | | | AAAAAGCCAA | |
| 1703566 | 1703564 | UCAAGGUUUUAG | 847 | 1566 | 1588 | 1703565 | GUUCCUCUGCU | 993 |
| | | CAGAGGAACGU | | | | | AAAACCUUGA | |
| 1703569 | 1703567 | UAUUUUUCAAGG | 848 | 1572 | 1594 | 1703568 | CUGCUAAAACC | 994 |
| | | UUUUAGCAGAG | | | | | UUGAAAAAUA | |
| 1703581 | 1703579 | UUUCAUCUCCUU | 849 | 1727 | 1749 | 1703580 | UCUGGAGCAAA | 995 |
| | | UGCUCCAGAAC | | | | | GGAGAUGAAA | |
| 1703584 | 1703582 | UGGCGAUCUUCG | 850 | 1761 | 1783 | 1703583 | AUGGUAAAACG | 996 |
| | | UUUUACCAUCA | | | | | AAGAUCGCCA | |
| 1703587 | 1703585 | UUGGACUUGACA | 851 | 2080 | 2102 | 1703586 | CCUGAAGAAUG | 997 |
| | | UUCUUCAGGUC | | | | | UCAAGUCCAA | |
| 1703602 | 1703600 | UGUUUGAUAUUA | 852 | 2200 | 2222 | 1703601 | CUCAAAGGAUA | 998 |
| | | UCCUUUGAGCC | | | | | AUAUCAAACA | |
| 1703614 | 1703612 | UCAGGUCAACUG | 853 | 2250 | 2272 | 1703613 | UCUACAAACCA | 999 |
| | | GUUUGUAGACU | | | | | GUUGACCUGA | |
| 1703617 | 1703615 | UGGUUUAUGAUG | 854 | 2300 | 2322 | 1703616 | GGCAACAUCCA | 1000 |
| | | GAUGUUGCCUA | | | | | UCAUAAACCA | |
| 1703620 | 1703618 | UUCUCAGAUUUU | 855 | 2332 | 2354 | 1703619 | GGUGGAAGUAA | 1001 |
| | | ACUUCCACCUG | | | | | AAUCUGAGAA | |
| 1703632 | 1703630 | UGGGUUUCAAUC | 856 | 2425 | 2447 | 1703631 | AAAUAAAAAGA | 1002 |
| | | UUUUUAUUUCC | | | | | UUGAAACCCA | |
| 1703641 | 1703639 | UCUCAUUCUCUC | 857 | 2676 | 2698 | 1703640 | UGUGGAGAGGA | 1003 |
| | | CUCUCCACAAU | | | | | GAGAAUGAGA | |
| 1703644 | 1703642 | UUUUUUUCCACA | 858 | 2691 | 2713 | 1703643 | AUGAGAGAGUG | 1004 |
| | | CUCUCUCAUUC | | | | | UGGAAAAAAA | |
| 1703647 | 1703645 | UUAUUCUUUUUU | 859 | 2699 | 2721 | 1703646 | GUGUGGAAAAA | 1005 |
| | | UUUCCACACUC | | | | | AAAAGAAUAA | |
| 1703650 | 1703648 | UUAACCAAUUAA | 860 | 2757 | 2779 | 1703649 | GCAGUUCGGUU | 1006 |
| | | CCGAACUGCGA | | | | | AAUUGGUUAA | |
| 1703656 | 1703654 | UGAUUUUGAAGU | 861 | 2807 | 2829 | 1703655 | UGGCUCGGGAC | 1007 |
| | | CCCGAGCCAAA | | | | | UUCAAAAUCA | |
| 1703662 | 1703660 | UUUGCUCUUACU | 862 | 2827 | 2849 | 1703661 | AGUGAUGGGAG | 1008 |
| | | CCCAUCACUGA | | | | | UAAGAGCAAA | |
| 1703671 | 1703669 | UUUGGAAAGAUG | 863 | 2842 | 2864 | 1703670 | AGCAAAUUUCA | 1009 |
| | | AAAUUUGCUCU | | | | | UCUUUCCAAA | |
| 1703680 | 1703678 | UUUUUUUAAAUA | 864 | 2878 | 2900 | 1703679 | GUAAUAAAAUA | 1010 |
| | | UUUUAUUACUA | | | | | UUUAAAAAAA | |
| 1703683 | 1703681 | UUUGAAUGUUUU | 865 | 2888 | 2910 | 1703682 | AUUUAAAAAAA | 1011 |
| | | UUUUUAAAUAU | | | | | AACAUUCAAA | |
| 1703686 | 1703684 | UGUUUUUGAAUG | 866 | 2892 | 2914 | 1703685 | AAAAAAAAACA | 1012 |
| | | UUUUUUUUUAA | | | | | UUCAAAAACA | |
| 1703707 | 1703705 | UGGAGGGGGAAG | 867 | 2951 | 2973 | 1703706 | UUCUUUUUUCU | 1013 |
| | | AAAAAAGAAUC | | | | | UCCCCCUCCA | |
| 1703710 | 1703708 | UUCUACAUGGAG | 868 | 2958 | 2980 | 1703709 | UUCUUCCCCCUC | 1014 |
| | | GGGGAAGAAAA | | | | | CAUGUAGAA | |
| 1703725 | 1703723 | UCAAGACAUCAA | 869 | 3478 | 3500 | 1703724 | AGACUGACCUU | 1015 |
| | | GGUCAGUCUUU | | | | | GAUGUCUUGA | |
| 1703749 | 1703747 | UUCCCUUAAUUU | 870 | 3941 | 3963 | 1703748 | CUGAGGGUGAA | 1016 |
| | | CACCCUCAGUA | | | | | AUUAAGGGAA | |
| 1703791 | 1703789 | UUAGAAACCUCU | 871 | 4605 | 4627 | 1703790 | UGCUUGUAAAG | 1017 |
| | | UUACAAGCAUU | | | | | AGGUUUCUAA | |
| 1703800 | 1703798 | UUCAGUCCUAAU | 872 | 4794 | 4816 | 1703799 | AAGCACAGGAU | 1018 |
| | | CCUGUGCUUCA | | | | | UAGGACUGAA | |
| 1703803 | 1703801 | UUCUUGUGAUGC | 873 | 4959 | 4981 | 1703802 | ACAACUCCUGCA | 1019 |
| | | AGGAGUUGUAA | | | | | UCACAAGAA | |
| 1703806 | 1703804 | UCCUUUUUCUUG | 874 | 4965 | 4987 | 1703805 | CCUGCAUCACAA | 1020 |
| | | UGAUGCAGGAG | | | | | GAAAAAGGA | |
| 1703812 | 1703810 | UUAGGCAGCAAU | 875 | 5297 | 5319 | 1703811 | UUGCAAAACAU | 1021 |
| | | GUUUUGCAAAG | | | | | UGCUGCCUAA | |
| 1703821 | 1703819 | UUUCAGGUAAAG | 876 | 5438 | 5460 | 1703820 | CAGCUAGAGCU | 1022 |
| | | CUCUAGCUGCA | | | | | UUACCUGAAA | |
| 1703824 | 1703822 | UCAACUUAGGAG | 877 | 5515 | 5537 | 1703823 | CCAGCAAUUCUC | 1023 |
| | | AAUUGCUGGGA | | | | | CUAAGUUGA | |
| 1703836 | 1703834 | UCUCUAACCACC | 878 | 5568 | 5590 | 1703835 | AGAUUUGGUGG | 1024 |
| | | ACCAAAUCUAC | | | | | UGGUUAGAGA | |
| 1703839 | 1703837 | UAAUGAGGGGGG | 879 | 5584 | 5606 | 1703838 | AGAGAUAUGCC | 1025 |
| | | CAUAUCUCUAA | | | | | CCCCUCAUUA | |
| 1703842 | 1703840 | UCACCCUAAACC | 880 | 5749 | 5771 | 1703841 | UAAGAUCAUGG | 1026 |
| | | AUGAUCUUAGG | | | | | UUUAGGGUGA | |
| 1703860 | 1703858 | UCAUUUAAGAUC | 881 | 5801 | 5823 | 1703859 | CUGGCUUGUGA | 1027 |
| | | ACAAGCCAGCG | | | | | UCUUAAAUGA | |
| 1703863 | 1703861 | UGUCCUCAUUUA | 882 | 5806 | 5828 | 1703862 | UUGUGAUCUUA | 1028 |
| | | AGAUCACAAGC | | | | | AAUGAGGACA | |
| 1703866 | 1703864 | UAUAUCCUAUCU | 883 | 5892 | 5914 | 1703865 | GGGUGGGCUAG | 1029 |
| | | AGCCCACCCAA | | | | | AUAGGAUAUA | |
| 1703872 | 1703870 | UUGAUAAAGUGA | 884 | 5933 | 5955 | 1703871 | GCUGCUGACUC | 1030 |
| | | GUCAGCAGCUU | | | | | ACUUUAUCAA | |
| 1703887 | 1703885 | UACAGUCUCACC | 885 | 5970 | 5992 | 1703886 | GACUUCAGUGG | 1031 |
| | | ACUGAAGUCAA | | | | | UGAGACUGUA | |
| 1703908 | 1703906 | UGAAAAGGGUUA | 886 | 6089 | 6111 | 1703907 | ACUGCCUCGUA | 1032 |
| | | CGAGGCAGUUU | | | | | ACCCUUUUCA | |
| 1703914 | 1703912 | UGUGGUUGAAAU | 887 | 6103 | 6125 | 1703913 | CUUUUCAUGAU | 1033 |
| | | CAUGAAAAGGG | | | | | UUCAACCACA | |
| 1703929 | 1703927 | UCGUGGCUUUAC | 888 | 6435 | 6457 | 1703928 | GUUCUCCAAGU | 1034 |
| | | UUGGAGAACAA | | | | | AAAGCCACGA | |
| 1703938 | 1703936 | UGAAGAGAAAUC | 889 | 6516 | 6538 | 1703937 | AAAACUUCUGA | 1035 |
| | | AGAAGUUUUAU | | | | | UUUCUCUUCA | |
| 1703941 | 1703939 | UCAAAGCUGAAG | 890 | 6523 | 6545 | 1703940 | CUGAUUUCUCU | 1036 |
| | | AGAAAUCAGAA | | | | | UCAGCUUUGA | |
| 1703947 | 1703945 | UCAUGGGGCUAA | 891 | 6582 | 6604 | 1703946 | CUAAUAGACUU | 1037 |
| | | GUCUAUUAGGA | | | | | AGCCCCAUGA | |
| 1703953 | 1703951 | UUGCAAGUGCCA | 892 | 6621 | 6643 | 1703952 | GACUAUUUCUG | 1038 |
| | | GAAAUAGUCCU | | | | | GCACUUGCAA | |
| 1703956 | 1703954 | UACCGAAGAAAU | 893 | 6641 | 6663 | 1703955 | AGUCCCAUGAU | 1039 |
| | | CAUGGGACUUG | | | | | UUCUUCGGUA | |
| 1703968 | 1703966 | UUCACAGACAGA | 894 | 6699 | 6721 | 1703967 | GCUUAGCUUUC | 1040 |
| | | AAGCUAAGCUA | | | | | UGUCUGUGAA | |
| 1703974 | 1703972 | UACACUAUAUAG | 895 | 6714 | 6736 | 1703973 | UGUGAAUGUCU | 1041 |
| | | ACAUUCACAGA | | | | | AUAUAGUGUA | |
| 1703980 | 1703978 | UGUUAAAACACA | 896 | 6729 | 6751 | 1703979 | AGUGUAUUGUG | 1042 |
| | | CAAUACACUAU | | | | | UGUUUUAACA | |
| 1703986 | 1703984 | UCAGUGUAAAUC | 897 | 6744 | 6766 | 1703985 | UUAACAAAUGA | 1043 |
| | | AUUUGUUAAAA | | | | | UUUACACUGA | |
| 1703998 | 1703996 | UUAUUUCCAAAU | 898 | 6774 | 6796 | 1703997 | UAAAAGUGAAU | 1044 |
| | | UCACUUUUACA | | | | | UUGGAAAUAA | |

[0580] “Start site” indicates the 5′-most nucleoside to which the antisense RNAi oligonucleotide is complementary target nucleic acid sequence. “Stop site” indicates the 3′-most nucleoside to which the antisense RNAi oligonucleotide is complementary in the target nucleic acid sequence. Each antisense RNAi oligonucleotide listed in the tables below is complementary to SEQ ID NO: 1 (GENBANK Accession No. NM_001377265.1), with a single mismatch at the 5′ end.

TABLE 22
RNAi compounds targeting human MAPT, SEQ ID NO: 1

| | | | | SEQ ID | SEQ ID | | | |
|---|---|---|---|---|---|---|---|---|
| | | | | NO: 1 | NO: 1 | | | |
| | Anti- | Antisense | SEQ | Antisense | Antisense | | Sense | SEQ |
| Compound | sense | Sequence | ID | Start | Stop | Sense | Sequence | ID |
| Number | ID | (5′ to 3′) | NO. | Site | Site | ID | (5′ to 3′) | NO. |
| 1702345 | 1702343 | UUUCACCUGAUA | 1045 | 117 | 138 | 1702344 | UCUGUCGACUA | 1444 |
| | | GUCGACAGAGG | | | | | UCAGGUGAAA | |
| 1702351 | 1702349 | UGUUCAAAGUUC | 1046 | 125 | 146 | 1702350 | CUAUCAGGUGA | 1445 |
| | | ACCUGAUAGUC | | | | | ACUUUGAACA | |
| 1702354 | 1702352 | UUGGUUCAAAGU | 1047 | 127 | 148 | 1702353 | AUCAGGUGAAC | 1446 |
| | | UCACCUGAUAG | | | | | UUUGAACCAA | |
| 1702357 | 1702355 | UCAUCCUGGUUC | 1048 | 132 | 153 | 1702356 | GUGAACUUUGA | 1447 |
| | | AAAGUUCACCU | | | | | ACCAGGAUGA | |
| 1702360 | 1702358 | UGGGCUCAGCCA | 1049 | 141 | 162 | 1702359 | GAACCAGGAUG | 1448 |
| | | UCCUGGUUCAA | | | | | GCUGAGCCCA | |
| 1702363 | 1702361 | UCGGGGCUCAGC | 1050 | 143 | 164 | 1702362 | ACCAGGAUGGC | 1449 |
| | | CAUCCUGGUUC | | | | | UGAGCCCCGA | |
| 1702369 | 1702367 | UACUCCUGGCGG | 1051 | 151 | 172 | 1702368 | GGCUGAGCCCCG | 1450 |
| | | GGCUCAGCCAU | | | | | CCAGGAGUA | |
| 1702372 | 1702370 | UCUUCGAACUCC | 1052 | 157 | 178 | 1702371 | GCCCCGCCAGGA | 1451 |
| | | UGGCGGGGCUC | | | | | GUUCGAAGA | |
| 1702378 | 1702376 | UAUCACUUCGAA | 1053 | 161 | 182 | 1702377 | CGCCAGGAGUU | 1452 |
| | | CUCCUGGCGGG | | | | | CGAAGUGAUA | |
| 1702384 | 1702382 | UUUCCAUCACUU | 1054 | 165 | 186 | 1702383 | AGGAGUUCGAA | 1453 |
| | | CGAACUCCUGG | | | | | GUGAUGGAAA | |
| 1702387 | 1702385 | UUGAUCUUCCAU | 1055 | 170 | 191 | 1702386 | UUCGAAGUGAU | 1454 |
| | | CACUUCGAACU | | | | | GGAAGAUCAA | |
| 1702390 | 1702388 | UCGUCCCAGCGU | 1056 | 180 | 201 | 1702389 | UGGAAGAUCAC | 1455 |
| | | GAUCUUCCAUC | | | | | GCUGGGACGA | |
| 1702393 | 1702391 | UUACGUCCCAGC | 1057 | 182 | 203 | 1702392 | GAAGAUCACGC | 1456 |
| | | GUGAUCUUCCA | | | | | UGGGACGUAA | |
| 1702396 | 1702394 | UCGUACGUCCCA | 1058 | 184 | 205 | 1702395 | AGAUCACGCUG | 1457 |
| | | GCGUGAUCUUC | | | | | GGACGUACGA | |
| 1702399 | 1702397 | UCCGUACGUCCC | 1059 | 185 | 206 | 1702398 | GAUCACGCUGG | 1458 |
| | | AGCGUGAUCUU | | | | | GACGUACGGA | |
| 1702402 | 1702400 | UCCCCAACCCGUA | 1060 | 192 | 213 | 1702401 | CUGGGACGUAC | 1459 |
| | | CGUCCCAGCG | | | | | GGGUUGGGGA | |
| 1702405 | 1702403 | UCCCUGAUCUUU | 1061 | 209 | 230 | 1702404 | GGGGACAGGAA | 1460 |
| | | CCUGUCCCCCA | | | | | AGAUCAGGGA | |
| 1702408 | 1702406 | UUGCAUGGUGUA | 1062 | 224 | 245 | 1702407 | CAGGGGGGCUA | 1461 |
| | | GCCCCCCUGAU | | | | | CACCAUGCAA | |
| 1702411 | 1702409 | UCCCUCUUGGUC | 1063 | 239 | 260 | 1702410 | AUGCACCAAGA | 1462 |
| | | UUGGUGCAUGG | | | | | CCAAGAGGGA | |
| 1702414 | 1702412 | UUCCGUGUCACC | 1064 | 248 | 269 | 1702413 | GACCAAGAGGG | 1463 |
| | | CUCUUGGUCUU | | | | | UGACACGGAA | |
| 1702417 | 1702415 | UCGUCCGUGUCA | 1065 | 250 | 271 | 1702416 | CCAAGAGGGUG | 1464 |
| | | CCCUCUUGGUC | | | | | ACACGGACGA | |
| 1702420 | 1702418 | UGCCAGCGUCCG | 1066 | 255 | 276 | 1702419 | AGGGUGACACG | 1465 |
| | | UGUCACCCUCU | | | | | GACGCUGGCA | |
| 1702426 | 1702424 | UGGGAGAUUCUU | 1067 | 270 | 291 | 1702425 | CUGGCCUGAAA | 1466 |
| | | UCAGGCCAGCG | | | | | GAAUCUCCCA | |
| 1702429 | 1702427 | UGGUCUGCAGGG | 1068 | 279 | 300 | 1702428 | AAGAAUCUCCCC | 1467 |
| | | GAGAUUCUUUC | | | | | UGCAGACCA | |
| 1702432 | 1702430 | UGUCCUCAGUGG | 1069 | 291 | 312 | 1702431 | UGCAGACCCCCA | 1468 |
| | | GGGUCUGCAGG | | | | | CUGAGGACA | |
| 1702435 | 1702433 | UGCCCGGUUCCU | 1070 | 309 | 330 | 1702434 | ACGGAUCUGAG | 1469 |
| | | CAGAUCCGUCC | | | | | GAACCGGGCA | |
| 1702438 | 1702436 | UUCAGAGGUUUC | 1071 | 323 | 344 | 1702437 | CCGGGCUCUGA | 1470 |
| | | AGAGCCCGGUU | | | | | AACCUCUGAA | |
| 1702450 | 1702448 | UUCUUCCAGGCU | 1072 | 389 | 410 | 1702449 | GACACCCCCAGC | 1471 |
| | | GGGGGUGUCUC | | | | | CUGGAAGAA | |
| 1702456 | 1702454 | UCUCCUCUUGGG | 1073 | 420 | 441 | 1702455 | GUCACGUGACCC | 1472 |
| | | UCACGUGACCA | | | | | AAGAGGAGA | |
| 1702459 | 1702457 | UGGAACUCUCAA | 1074 | 431 | 452 | 1702458 | CAAGAGGAGUU | 1473 |
| | | CUCCUCUUGGG | | | | | GAGAGUUCCA | |
| 1702465 | 1702463 | UAGGGGCCUUUC | 1075 | 464 | 485 | 1702464 | AAGGCGCCUGA | 1474 |
| | | AGGCGCCUUCC | | | | | AAGGCCCCUA | |
| 1702468 | 1702466 | UCGCUAAUCUCA | 1076 | 481 | 502 | 1702467 | CCUGGCCAAUG | 1475 |
| | | UUGGCCAGGGG | | | | | AGAUUAGCGA | |
| 1702474 | 1702472 | UGAGACCCCAGA | 1077 | 524 | 545 | 1702473 | GGAGAGGCCUC | 1476 |
| | | GGCCUCUCCGC | | | | | UGGGGUCUCA | |
| 1702477 | 1702475 | UGGAGCUUCUGG | 1078 | 560 | 581 | 1702476 | GAGAAAGAGCC | 1477 |
| | | CUCUUUCUCCC | | | | | AGAAGCUCCA | |
| 1702480 | 1702478 | UGGCGCUGGGCA | 1079 | 611 | 632 | 1702479 | CGUCCCGUUUGC | 1478 |
| | | AACGGGACGGU | | | | | CCAGCGCCA | |
| 1702483 | 1702481 | UUUUUUGUCCCC | 1080 | 660 | 681 | 1702482 | CCCUGGAGUGG | 1479 |
| | | ACUCCAGGGAG | | | | | GGACAAAAAA | |
| 1702486 | 1702484 | UAAAGGCCGGAC | 1081 | 693 | 714 | 1702485 | CCGAGAAGGGU | 1480 |
| | | CCUUCUCGGCC | | | | | CCGGCCUUUA | |
| 1702489 | 1702487 | UAGGCUCUGUGU | 1082 | 732 | 753 | 1702488 | CGUAUCUCCACA | 1481 |
| | | GGAGAUACGCA | | | | | CAGAGCCUA | |
| 1702492 | 1702490 | UCACCUUACCAC | 1083 | 747 | 768 | 1702491 | AGCCUGAAAGU | 1482 |
| | | UUUCAGGCUCU | | | | | GGUAAGGUGA | |
| 1702495 | 1702493 | UGCCUUCCUGGA | 1084 | 759 | 780 | 1702494 | GUAAGGUGGUC | 1483 |
| | | CCACCUUACCA | | | | | CAGGAAGGCA | |
| 1702498 | 1702496 | UUGGGGGGCCUG | 1085 | 783 | 804 | 1702497 | UCCGAGAGCCA | 1484 |
| | | GCUCUCGGAGG | | | | | GGCCCCCCAA | |
| 1702504 | 1702502 | UGAAGGUUGGCG | 1086 | 866 | 887 | 1702503 | GAGGCCACACGC | 1485 |
| | | UGUGGCCUCUC | | | | | CAACCUUCA | |
| 1702507 | 1702505 | UGCCGCCCUCUG | 1087 | 897 | 918 | 1702506 | CUGAGGACACA | 1486 |
| | | UGUCCUCAGGU | | | | | GAGGGCGGCA | |
| 1702510 | 1702508 | UUCCUAGAAGCU | 1088 | 936 | 957 | 1702509 | UCAAGCACCAGC | 1487 |
| | | GGUGCUUGAGC | | | | | UUCUAGGAA | |
| 1702513 | 1702511 | UUGGUGCAGGUC | 1089 | 947 | 968 | 1702512 | CUUCUAGGAGA | 1488 |
| | | UCCUAGAAGCU | | | | | CCUGCACCAA | |
| 1702516 | 1702514 | UUUUGCCCCCUG | 1090 | 981 | 1002 | 1702515 | UGAAGGGGGCA | 1489 |
| | | CCCCCUUCAGC | | | | | GGGGGCAAAA | |
| 1702519 | 1702517 | UGCGGUCUUCAU | 1091 | 1020 | 1041 | 1702518 | AGGAGGUGGAU | 1490 |
| | | CCACCUCCUCC | | | | | GAAGACCGCA | |
| 1702525 | 1702523 | UGCUGUCUGGGG | 1092 | 1100 | 1121 | 1702524 | GGGCGGCCUCCC | 1491 |
| | | AGGCCGCCCAU | | | | | CAGACAGCA | |
| 1702531 | 1702529 | UAUCUCUGUGGA | 1093 | 1190 | 1211 | 1702530 | UCCAAAGUUUC | 1492 |
| | | AACUUUGGAGA | | | | | CACAGAGAUA | |
| 1702540 | 1702538 | UCACGUGAAACG | 1094 | 1269 | 1290 | 1702539 | UGGAGUUCACG | 1493 |
| | | UGAACUCCAGG | | | | | UUUCACGUGA | |
| 1702543 | 1702541 | UGUUGGGUGUGA | 1095 | 1284 | 1305 | 1702542 | ACGUGGAAAUC | 1494 |
| | | UUUCCACGUGA | | | | | ACACCCAACA | |
| 1702549 | 1702547 | UUCCGAGUGCGC | 1096 | 1310 | 1331 | 1702548 | AAGGAGCAGGC | 1495 |
| | | CUGCUCCUUCU | | | | | GCACUCGGAA | |
| 1702552 | 1702550 | UCAGCCCUUCCCA | 1097 | 1330 | 1351 | 1702551 | GGAGCAUUUGG | 1496 |
| | | AAUGCUCCUC | | | | | GAAGGGCUGA | |
| 1702555 | 1702553 | UCCUCUUUUGUG | 1098 | 1399 | 1420 | 1702554 | GGGAGAGGACA | 1497 |
| | | UCCUCUCCCAA | | | | | CAAAAGAGGA | |
| 1702558 | 1702556 | UGCUCUGGAAGG | 1099 | 1414 | 1435 | 1702557 | AGAGGCUGACC | 1498 |
| | | UCAGCCUCUUU | | | | | UUCCAGAGCA | |
| 1702561 | 1702559 | UGCUGCUUUUCA | 1100 | 1429 | 1450 | 1702560 | AGAGCCCUCUG | 1499 |
| | | GAGGGCUCUGG | | | | | AAAAGCAGCA | |
| 1702564 | 1702562 | UCAGCAGCAGGC | 1101 | 1438 | 1459 | 1702563 | UGAAAAGCAGC | 1500 |
| | | UGCUUUUCAGA | | | | | CUGCUGCUGA | |
| 1702567 | 1702565 | UUGACGGGCUUC | 1102 | 1459 | 1480 | 1702566 | UCCGCGGGGGA | 1501 |
| | | CCCCGCGGAGC | | | | | AGCCCGUCAA | |
| 1702579 | 1702577 | UUUUUUUGUCAU | 1103 | 1530 | 1551 | 1702578 | CUGGAAGCGAU | 1502 |
| | | CGCUUCCAGUC | | | | | GACAAAAAAA | |
| 1702582 | 1702580 | UUGUGGAUGUCU | 1104 | 1545 | 1566 | 1702581 | AAAAAGCCAAG | 1503 |
| | | UGGCUUUUUUG | | | | | ACAUCCACAA | |
| 1702588 | 1702586 | UCCUAUUUUUCA | 1105 | 1575 | 1596 | 1702587 | CUAAAACCUUG | 1504 |
| | | AGGUUUUAGCA | | | | | AAAAAUAGGA | |
| 1702591 | 1702589 | UGGCUAAGGCAA | 1106 | 1588 | 1609 | 1702590 | AAAUAGGCCUU | 1505 |
| | | GGCCUAUUUUU | | | | | GCCUUAGCCA | |
| 1702600 | 1702598 | UAGGGUCUGAGC | 1107 | 1620 | 1641 | 1702599 | CUCCUGGUAGC | 1506 |
| | | UACCAGGAGUG | | | | | UCAGACCCUA | |
| 1702603 | 1702601 | UGGUUGGAUCAG | 1108 | 1631 | 1652 | 1702602 | UCAGACCCUCUG | 1507 |
| | | AGGGUCUGAGC | | | | | AUCCAACCA | |
| 1702606 | 1702604 | UUGGGCACACAG | 1109 | 1653 | 1674 | 1702605 | CCAGCCCUGCUG | 1508 |
| | | CAGGGCUGGAG | | | | | UGUGCCCAA | |
| 1702609 | 1702607 | UACGUAUUUAGG | 1110 | 1679 | 1700 | 1702608 | CCUUCCUCUCCU | 1509 |
| | | AGAGGAAGGUG | | | | | AAAUACGUA | |
| 1702612 | 1702610 | UGAAGUGACAGA | 1111 | 1694 | 1715 | 1702611 | UACGUCUCUUC | 1510 |
| | | AGAGACGUAUU | | | | | UGUCACUUCA | |
| 1702615 | 1702613 | UGAACUGCCAGU | 1112 | 1709 | 1730 | 1702614 | ACUUCCCGAACU | 1511 |
| | | UCGGGAAGUGA | | | | | GGCAGUUCA | |
| 1702618 | 1702616 | UAUCUCCUUUGC | 1113 | 1724 | 1745 | 1702617 | AGUUCUGGAGC | 1512 |
| | | UCCAGAACUGC | | | | | AAAGGAGAUA | |
| 1702621 | 1702619 | UGCCCCCUUGAG | 1114 | 1739 | 1760 | 1702620 | GAGAUGAAACU | 1513 |
| | | UUUCAUCUCCU | | | | | CAAGGGGGCA | |
| 1702624 | 1702622 | UUUCGUUUUACC | 1115 | 1754 | 1775 | 1702623 | GGGGCUGAUGG | 1514 |
| | | AUCAGCCCCCU | | | | | UAAAACGAAA | |
| 1702627 | 1702625 | UGCGAUCUUCGU | 1116 | 1760 | 1781 | 1702626 | GAUGGUAAAAC | 1515 |
| | | UUUACCAUCAG | | | | | GAAGAUCGCA | |
| 1702630 | 1702628 | UUGGCGAUCUUC | 1117 | 1762 | 1783 | 1702629 | UGGUAAAACGA | 1516 |
| | | GUUUUACCAUC | | | | | AGAUCGCCAA | |
| 1702633 | 1702631 | UGUGUGGCGAUC | 1118 | 1765 | 1786 | 1702632 | UAAAACGAAGA | 1517 |
| | | UUCGUUUUACC | | | | | UCGCCACACA | |
| 1702636 | 1702634 | UCCCUUCUGGCC | 1119 | 1796 | 1817 | 1702635 | GCCCCUCCAGGC | 1518 |
| | | UGGAGGGGCUG | | | | | CAGAAGGGA | |
| 1702639 | 1702637 | UGUUUUUGCUGG | 1120 | 1829 | 1850 | 1702638 | ACCAGGAUUCC | 1519 |
| | | AAUCCUGGUGG | | | | | AGCAAAAACA | |
| 1702642 | 1702640 | UAGCGGGCGGGG | 1121 | 1839 | 1860 | 1702641 | CAGCAAAAACCC | 1520 |
| | | UUUUUGCUGGA | | | | | CGCCCGCUA | |
| 1702645 | 1702643 | UGUGGUGUCUUU | 1122 | 1852 | 1873 | 1702644 | GCCCGCUCCAAA | 1521 |
| | | GGAGCGGGCGG | | | | | GACACCACA | |
| 1702648 | 1702646 | UGUUCACCAGAG | 1123 | 1867 | 1888 | 1702647 | ACCACCCAGCUC | 1522 |
| | | CUGGGUGGUGU | | | | | UGGUGAACA | |
| 1702654 | 1702652 | UCCGCUGCGAUC | 1124 | 1892 | 1913 | 1702653 | AAAUCAGGGGA | 1523 |
| | | CCCUGAUUUUG | | | | | UCGCAGCGGA | |
| 1702657 | 1702655 | UCGGGGUGCGGG | 1125 | 1944 | 1965 | 1702656 | GCAGCCGCUCCC | 1524 |
| | | AGCGGCUGCCG | | | | | GCACCCCGA | |
| 1702660 | 1702658 | UUGGAGUACGGA | 1126 | 2001 | 2022 | 1702659 | UGGCAGUGGUC | 1525 |
| | | CCACUGCCACC | | | | | CGUACUCCAA | |
| 1702663 | 1702661 | UGCGACUUGGGU | 1127 | 2011 | 2032 | 1702662 | CCGUACUCCACC | 1526 |
| | | GGAGUACGGAC | | | | | CAAGUCGCA | |
| 1702666 | 1702664 | UGCUGUCUGCAG | 1128 | 2042 | 2063 | 1702665 | AAGAGCCGCCU | 1527 |
| | | GCGGCUCUUGG | | | | | GCAGACAGCA | |
| 1702669 | 1702667 | UUUGACAUUCUU | 1129 | 2075 | 2096 | 1702668 | CCAGACCUGAA | 1528 |
| | | CAGGUCUGGCA | | | | | GAAUGUCAAA | |
| 1702672 | 1702670 | UGAGCCGAUCUU | 1130 | 2090 | 2111 | 1702671 | GUCAAGUCCAA | 1529 |
| | | GGACUUGACAU | | | | | GAUCGGCUCA | |
| 1702675 | 1702673 | UUUCAGGUUCUC | 1131 | 2105 | 2126 | 1702674 | GGCUCCACUGA | 1530 |
| | | AGUGGAGCCGA | | | | | GAACCUGAAA | |
| 1702681 | 1702679 | UUUAUUAAUUAU | 1132 | 2144 | 2165 | 1702680 | AAGGUGCAGAU | 1531 |
| | | CUGCACCUUCC | | | | | AAUUAAUAAA | |
| 1702684 | 1702682 | UCUAAGAUCCAG | 1133 | 2159 | 2180 | 1702683 | AAUAAGAAGCU | 1532 |
| | | CUUCUUAUUAA | | | | | GGAUCUUAGA | |
| 1702687 | 1702685 | UUUGGACUGGAC | 1134 | 2174 | 2195 | 1702686 | CUUAGCAACGU | 1533 |
| | | GUUGCUAAGAU | | | | | CCAGUCCAAA | |
| 1702690 | 1702688 | UUCCUUUGAGCC | 1135 | 2189 | 2210 | 1702689 | UCCAAGUGUGG | 1534 |
| | | ACACUUGGACU | | | | | CUCAAAGGAA | |
| 1702693 | 1702691 | UACGUGUUUGAU | 1136 | 2204 | 2225 | 1702692 | AAGGAUAAUAU | 1535 |
| | | AUUAUCCUUUG | | | | | CAAACACGUA | |
| 1702696 | 1702694 | UCACUGCCGCCUC | 1137 | 2221 | 2242 | 1702695 | CGUCCCGGGAG | 1536 |
| | | CCGGGACGUG | | | | | GCGGCAGUGA | |
| 1702702 | 1702700 | UCUCAGGUCAAC | 1138 | 2252 | 2273 | 1702701 | UACAAACCAGU | 1537 |
| | | UGGUUUGUAGA | | | | | UGACCUGAGA | |
| 1702705 | 1702703 | UUUGGAGGUCAC | 1139 | 2267 | 2288 | 1702704 | CUGAGCAAGGU | 1538 |
| | | CUUGCUCAGGU | | | | | GACCUCCAAA | |
| 1702708 | 1702706 | UCCUAAUGAGCC | 1140 | 2282 | 2303 | 1702707 | UCCAAGUGUGG | 1539 |
| | | ACACUUGGAGG | | | | | CUCAUUAGGA | |
| 1702714 | 1702712 | UGCCACCUCCUG | 1141 | 2310 | 2331 | 1702713 | AUCAUAAACCA | 1540 |
| | | GUUUAUGAUGG | | | | | GGAGGUGGCA | |
| 1702720 | 1702718 | UAAGCUUCUCAG | 1142 | 2337 | 2358 | 1702719 | AAGUAAAAUCU | 1541 |
| | | AUUUUACUUCC | | | | | GAGAAGCUUA | |
| 1702723 | 1702721 | UUCUGUCCUUGA | 1143 | 2352 | 2373 | 1702722 | AGCUUGACUUC | 1542 |
| | | AGUCAAGCUUC | | | | | AAGGACAGAA | |
| 1702726 | 1702724 | UAAUCUUCGACU | 1144 | 2367 | 2388 | 1702725 | ACAGAGUCCAG | 1543 |
| | | GGACUCUGUCC | | | | | UCGAAGAUUA | |
| 1702732 | 1702730 | UGACGUGGGUGA | 1145 | 2394 | 2415 | 1702731 | UGGACAAUAUC | 1544 |
| | | UAUUGUCCAGG | | | | | ACCCACGUCA | |
| 1702741 | 1702739 | UGUCAGCUUGUG | 1146 | 2435 | 2456 | 1702740 | AUUGAAACCCA | 1545 |
| | | GGUUUCAAUCU | | | | | CAAGCUGACA | |
| 1702744 | 1702742 | UUUCUCGCGGAA | 1147 | 2447 | 2468 | 1702743 | AAGCUGACCUU | 1546 |
| | | GGUCAGCUUGU | | | | | CCGCGAGAAA | |
| 1702750 | 1702748 | UGAUCUCCGCCCC | 1148 | 2481 | 2502 | 1702749 | CAGACCACGGG | 1547 |
| | | GUGGUCUGUC | | | | | GCGGAGAUCA | |
| 1702753 | 1702751 | UCCACUGGCGAC | 1149 | 2500 | 2521 | 1702752 | CGUGUACAAGU | 1548 |
| | | UUGUACACGAU | | | | | CGCCAGUGGA | |
| 1702759 | 1702757 | UGAGACAUUGCU | 1150 | 2540 | 2561 | 1702758 | CGGCAUCUCAGC | 1549 |
| | | GAGAUGCCGUG | | | | | AAUGUCUCA | |
| 1702765 | 1702763 | UAUGUCGAUGCU | 1151 | 2561 | 2582 | 1702764 | UCCACCGGCAGC | 1550 |
| | | GCCGGUGGAGG | | | | | AUCGACAUA | |
| 1702768 | 1702766 | UGCGAGUCUACC | 1152 | 2572 | 2593 | 1702767 | CAUCGACAUGG | 1551 |
| | | AUGUCGAUGCU | | | | | UAGACUCGCA | |
| 1702771 | 1702769 | UUAGCGUGGCGA | 1153 | 2589 | 2610 | 1702770 | CGCCCCAGCUCG | 1552 |
| | | GCUGGGGCGAG | | | | | CCACGCUAA | |
| 1702774 | 1702772 | UGACACCUCGUC | 1154 | 2603 | 2624 | 1702773 | ACGCUAGCUGA | 1553 |
| | | AGCUAGCGUGG | | | | | CGAGGUGUCA | |
| 1702780 | 1702778 | UUGAUCACAAAC | 1155 | 2634 | 2655 | 1702779 | CCAAGCAGGGU | 1554 |
| | | CCUGCUUGGCC | | | | | UUGUGAUCAA | |
| 1702783 | 1702781 | UCCGCCCCAGGG | 1156 | 2648 | 2669 | 1702782 | UGAUCAGGCCCC | 1555 |
| | | GCCUGAUCACA | | | | | UGGGGCGGA | |
| 1702786 | 1702784 | UCUCUCCACAAU | 1157 | 2665 | 2686 | 1702785 | CGGUCAAUAAU | 1556 |
| | | UAUUGACCGCC | | | | | UGUGGAGAGA | |
| 1702789 | 1702787 | UCUCUCUCAUUC | 1158 | 2680 | 2701 | 1702788 | GAGAGGAGAGA | 1557 |
| | | UCUCCUCUCCA | | | | | AUGAGAGAGA | |
| 1702795 | 1702793 | UCCGGGUCAUUA | 1159 | 2708 | 2729 | 1702794 | AAAAAAGAAUA | 1558 |
| | | UUCUUUUUUUU | | | | | AUGACCCGGA | |
| 1702798 | 1702796 | UAGCUGGGGGCA | 1160 | 2730 | 2751 | 1702797 | CCCGCCCUCUGC | 1559 |
| | | GAGGGCGGGGG | | | | | CCCCAGCUA | |
| 1702801 | 1702799 | UACCAAUUAACC | 1161 | 2755 | 2776 | 1702800 | UCGCAGUUCGG | 1560 |
| | | GAACUGCGAGG | | | | | UUAAUUGGUA | |
| 1702804 | 1702802 | UCAGGUUAAGUG | 1162 | 2770 | 2791 | 1702803 | UUGGUUAAUCA | 1561 |
| | | AUUAACCAAUU | | | | | CUUAACCUGA | |
| 1702807 | 1702805 | UGCCGAGUGACA | 1163 | 2785 | 2806 | 1702806 | ACCUGCUUUUG | 1562 |
| | | AAAGCAGGUUA | | | | | UCACUCGGCA | |
| 1702810 | 1702808 | UAAGUCCCGAGC | 1164 | 2800 | 2821 | 1702809 | UCGGCUUUGGC | 1563 |
| | | CAAAGCCGAGU | | | | | UCGGGACUUA | |
| 1702813 | 1702811 | UCCAUCACUGAU | 1165 | 2815 | 2836 | 1702812 | GACUUCAAAAU | 1564 |
| | | UUUGAAGUCCC | | | | | CAGUGAUGGA | |
| 1702816 | 1702814 | UAAUUUGCUCUU | 1166 | 2830 | 2851 | 1702815 | GAUGGGAGUAA | 1565 |
| | | ACUCCCAUCAC | | | | | GAGCAAAUUA | |
| 1702819 | 1702817 | UAAUUUGGAAAG | 1167 | 2845 | 2866 | 1702818 | AAAUUUCAUCU | 1566 |
| | | AUGAAAUUUGC | | | | | UUCCAAAUUA | |
| 1702825 | 1702823 | UAAUAUUUUAUU | 1168 | 2871 | 2892 | 1702824 | UGGGCUAGUAA | 1567 |
| | | ACUAGCCCACC | | | | | UAAAAUAUUA | |
| 1702828 | 1702826 | UAUGUUUUUUUU | 1169 | 2884 | 2905 | 1702827 | AAAUAUUUAAA | 1568 |
| | | UAAAUAUUUUA | | | | | AAAAAACAUA | |
| 1702831 | 1702829 | UAUGUGGCCAUG | 1170 | 2902 | 2923 | 1702830 | AUUCAAAAACA | 1569 |
| | | UUUUUGAAUGU | | | | | UGGCCACAUA | |
| 1702834 | 1702832 | UCUGAGGAAAUG | 1171 | 2917 | 2938 | 1702833 | CACAUCCAACAU | 1570 |
| | | UUGGAUGUGGC | | | | | UUCCUCAGA | |
| 1702837 | 1702835 | UAUCAAAAGGAA | 1172 | 2932 | 2953 | 1702836 | CUCAGGCAAUU | 1571 |
| | | UUGCCUGAGGA | | | | | CCUUUUGAUA | |
| 1702840 | 1702838 | UGGGGAAGAAAA | 1173 | 2947 | 2968 | 1702839 | UUGAUUCUUUU | 1572 |
| | | AAGAAUCAAAA | | | | | UUCUUCCCCA | |
| 1702843 | 1702841 | UCUCUUCUACAU | 1174 | 2962 | 2983 | 1702842 | UCCCCCUCCAUG | 1573 |
| | | GGAGGGGGAAG | | | | | UAGAAGAGA | |
| 1702846 | 1702844 | UAGCCUCUCCUU | 1175 | 2977 | 2998 | 1702845 | AAGAGGGAGAA | 1574 |
| | | CUCCCUCUUCU | | | | | GGAGAGGCUA | |
| 1702849 | 1702847 | UAGAAGCAGCUU | 1176 | 2992 | 3013 | 1702848 | AGGCUCUGAAA | 1575 |
| | | UCAGAGCCUCU | | | | | GCUGCUUCUA | |
| 1702852 | 1702850 | UCUUGAAAUCCC | 1177 | 3005 | 3026 | 1702851 | UGCUUCUGGGG | 1576 |
| | | CCAGAAGCAGC | | | | | GAUUUCAAGA | |
| 1702855 | 1702853 | UCCCCCAGUCCCU | 1178 | 3015 | 3036 | 1702854 | GGAUUUCAAGG | 1577 |
| | | UGAAAUCCCC | | | | | GACUGGGGGA | |
| 1702858 | 1702856 | UCCCACAACAGG | 1179 | 3043 | 3064 | 1702857 | ACCUCUGGCCCU | 1578 |
| | | GCCAGAGGUGG | | | | | GUUGUGGGA | |
| 1702864 | 1702862 | UCACCAAGUUUC | 1180 | 3089 | 3110 | 1702863 | AAAGGAUUUGA | 1579 |
| | | AAAUCCUUUGU | | | | | AACUUGGUGA | |
| 1702867 | 1702865 | UGCUCCACGAAC | 1181 | 3101 | 3122 | 1702866 | ACUUGGUGUGU | 1580 |
| | | ACACCAAGUUU | | | | | UCGUGGAGCA | |
| 1702870 | 1702868 | UGUCUGCCUGUG | 1182 | 3112 | 3133 | 1702869 | UCGUGGAGCCA | 1581 |
| | | GCUCCACGAAC | | | | | CAGGCAGACA | |
| 1702873 | 1702871 | UCACAAGGUUGA | 1183 | 3127 | 3148 | 1702872 | CAGACGAUGUC | 1582 |
| | | CAUCGUCUGCC | | | | | AACCUUGUGA | |
| 1702876 | 1702874 | UCUCUCCCACUCC | 1184 | 3228 | 3249 | 1702875 | AAGAAGUGGGA | 1583 |
| | | CACUUCUUGU | | | | | GUGGGAGAGA | |
| 1702879 | 1702877 | UCACGUGGCUUC | 1185 | 3239 | 3260 | 1702878 | GUGGGAGAGGA | 1584 |
| | | CUCUCCCACUC | | | | | AGCCACGUGA | |
| 1702882 | 1702880 | UGAUGUCUACUC | 1186 | 3255 | 3276 | 1702881 | CGUGCUGGAGA | 1585 |
| | | UCCAGCACGUG | | | | | GUAGACAUCA | |
| 1702885 | 1702883 | UAAGGAGGGGGA | 1187 | 3264 | 3285 | 1702884 | GAGUAGACAUC | 1586 |
| | | UGUCUACUCUC | | | | | CCCCUCCUUA | |
| 1702888 | 1702886 | UCCCCCGGCCACC | 1188 | 3334 | 3355 | 1702887 | CUGUCCUUGGU | 1587 |
| | | AAGGACAGGC | | | | | GGCCGGGGGA | |
| 1702897 | 1702895 | UGAAGUGCCACC | 1189 | 3438 | 3459 | 1702896 | UGGCAGGAGGG | 1588 |
| | | CUCCUGCCAGC | | | | | UGGCACUUCA | |
| 1702903 | 1702901 | UCAUCAAGGUCA | 1190 | 3473 | 3494 | 1702902 | AGAAAAGACUG | 1589 |
| | | GUCUUUUCUAA | | | | | ACCUUGAUGA | |
| 1702906 | 1702904 | UCAGCGCUCUCA | 1191 | 3487 | 3508 | 1702905 | UUGAUGUCUUG | 1590 |
| | | AGACAUCAAGG | | | | | AGAGCGCUGA | |
| 1702912 | 1702910 | UACAGGGUUUCU | 1192 | 3559 | 3580 | 1702911 | CUGCUCCACAGA | 1591 |
| | | GUGGAGCAGAG | | | | | AACCCUGUA | |
| 1702918 | 1702916 | UCAGCAGUUCCA | 1193 | 3589 | 3610 | 1702917 | UCUGAAGGUUG | 1592 |
| | | ACCUUCAGAAC | | | | | GAACUGCUGA | |
| 1702921 | 1702919 | UUGGCCAAAAUC | 1194 | 3604 | 3625 | 1702920 | UGCUGCCAUGA | 1593 |
| | | AUGGCAGCAGU | | | | | UUUUGGCCAA | |
| 1702930 | 1702928 | UCUUACAAAGAG | 1195 | 3649 | 3670 | 1702929 | UAACCAGUUCU | 1594 |
| | | AACUGGUUAGC | | | | | CUUUGUAAGA | |
| 1702933 | 1702931 | UCAAGAGGCACA | 1196 | 3664 | 3685 | 1702932 | GUAAGGACUUG | 1595 |
| | | AGUCCUUACAA | | | | | UGCCUCUUGA | |
| 1702936 | 1702934 | UGUGGACGUCUC | 1197 | 3676 | 3697 | 1702935 | GCCUCUUGGGA | 1596 |
| | | CCAAGAGGCAC | | | | | GACGUCCACA | |
| 1702939 | 1702937 | UGGCUUGGAAAC | 1198 | 3689 | 3710 | 1702938 | CGUCCACCCGUU | 1597 |
| | | GGGUGGACGUC | | | | | UCCAAGCCA | |
| 1702942 | 1702940 | UAGUGGCCCAGG | 1199 | 3698 | 3719 | 1702941 | GUUUCCAAGCC | 1598 |
| | | CUUGGAAACGG | | | | | UGGGCCACUA | |
| 1702945 | 1702943 | UGAGAUGCCAGU | 1200 | 3706 | 3727 | 1702944 | GCCUGGGCCACU | 1599 |
| | | GGCCCAGGCUU | | | | | GGCAUCUCA | |
| 1702948 | 1702946 | UCCCACACACUCC | 1201 | 3719 | 3740 | 1702947 | GCAUCUCUGGA | 1600 |
| | | AGAGAUGCCA | | | | | GUGUGUGGGA | |
| 1702951 | 1702949 | UAGUGGCCGUGG | 1202 | 3765 | 3786 | 1702950 | CUGUCCUUCCCA | 1601 |
| | | GAAGGACAGGG | | | | | CGGCCACUA | |
| 1702960 | 1702958 | UCGUGUGAUGAG | 1203 | 3841 | 3862 | 1702959 | CCUAUACCCCUC | 1602 |
| | | GGGUAUAGGCA | | | | | AUCACACGA | |
| 1702963 | 1702961 | UUUCGGGACAUU | 1204 | 3856 | 3877 | 1702962 | ACACGUCACAA | 1603 |
| | | GUGACGUGUGA | | | | | UGUCCCGAAA | |
| 1702972 | 1702970 | UCCAACCAGGGU | 1205 | 3898 | 3919 | 1702971 | UCAGUAAUGAC | 1604 |
| | | CAUUACUGAGA | | | | | CCUGGUUGGA | |
| 1702978 | 1702976 | UCCCUCAGUAUG | 1206 | 3928 | 3949 | 1702977 | UACCUACUCCAU | 1605 |
| | | GAGUAGGUACC | | | | | ACUGAGGGA | |
| 1702981 | 1702979 | UCUUCCCUUAAU | 1207 | 3943 | 3964 | 1702980 | GAGGGUGAAAU | 1606 |
| | | UUCACCCUCAG | | | | | UAAGGGAAGA | |
| 1702990 | 1702988 | UGAGGCUGGGGU | 1208 | 3978 | 3999 | 1702989 | AAGAGUGGGAC | 1607 |
| | | CCCACUCUUGU | | | | | CCCAGCCUCA | |
| 1702996 | 1702994 | UGGUCCCAGUUG | 1209 | 4010 | 4031 | 1702995 | CCACUCAUCCAA | 1608 |
| | | GAUGAGUGGAA | | | | | CUGGGACCA | |
| 1702999 | 1702997 | UGAUUCGUGGUG | 1210 | 4023 | 4044 | 1702998 | UGGGACCCUCAC | 1609 |
| | | AGGGUCCCAGU | | | | | CACGAAUCA | |
| 1703002 | 1703000 | UCGAAUCAGAUC | 1211 | 4038 | 4059 | 1703001 | GAAUCUCAUGA | 1610 |
| | | AUGAGAUUCGU | | | | | UCUGAUUCGA | |
| 1703005 | 1703003 | UGAGACAGGGAA | 1212 | 4050 | 4071 | 1703004 | CUGAUUCGGUU | 1611 |
| | | CCGAAUCAGAU | | | | | CCCUGUCUCA | |
| 1703008 | 1703006 | UUGACGGGAGGA | 1213 | 4062 | 4083 | 1703007 | CCUGUCUCCUCC | 1612 |
| | | GGAGACAGGGA | | | | | UCCCGUCAA | |
| 1703011 | 1703009 | UUGGCUCACAUC | 1214 | 4075 | 4096 | 1703010 | CCCGUCACAGAU | 1613 |
| | | UGUGACGGGAG | | | | | GUGAGCCAA | |
| 1703014 | 1703012 | UCAGCUGAGCAG | 1215 | 4091 | 4112 | 1703013 | GCCAGGGCACU | 1614 |
| | | UGCCCUGGCUC | | | | | GCUCAGCUGA | |
| 1703017 | 1703015 | UAGAAACACCUA | 1216 | 4108 | 4129 | 1703016 | CUGUGACCCUA | 1615 |
| | | GGGUCACAGCU | | | | | GGUGUUUCUA | |
| 1703023 | 1703021 | UGGGAAAGGGCU | 1217 | 4138 | 4159 | 1703022 | CAUGGAGAGAG | 1616 |
| | | CUCUCCAUGUC | | | | | CCCUUUCCCA | |
| 1703029 | 1703027 | UCCACUGACAAC | 1218 | 4206 | 4227 | 1703028 | GGUGUCUUGGU | 1617 |
| | | CAAGACACCCA | | | | | UGUCAGUGGA | |
| 1703032 | 1703030 | UUCCUGGUGCCA | 1219 | 4217 | 4238 | 1703031 | UGUCAGUGGUG | 1618 |
| | | CCACUGACAAC | | | | | GCACCAGGAA | |
| 1703035 | 1703033 | UACUGUGGGCCU | 1220 | 4251 | 4272 | 1703034 | ACCCAGGGCAG | 1619 |
| | | GCCCUGGGUGC | | | | | GCCCACAGUA | |
| 1703044 | 1703042 | UGCAGCGGGCUG | 1221 | 4316 | 4337 | 1703043 | CAGACAGCCCAG | 1620 |
| | | GGCUGUCUGGG | | | | | CCCGCUGCA | |
| 1703047 | 1703045 | UUGAUACUAUGC | 1222 | 4339 | 4360 | 1703046 | GCUCCACAUGCA | 1621 |
| | | AUGUGGAGCUG | | | | | UAGUAUCAA | |
| 1703050 | 1703048 | UGGGUGUGGAGG | 1223 | 4352 | 4373 | 1703049 | AGUAUCAGCCC | 1622 |
| | | GCUGAUACUAU | | | | | UCCACACCCA | |
| 1703056 | 1703054 | UAAGGGGGUGUG | 1224 | 4375 | 4396 | 1703055 | AAAGGGGAACA | 1623 |
| | | UUCCCCUUUGU | | | | | CACCCCCUUA | |
| 1703059 | 1703057 | UAAAAGAACCAU | 1225 | 4390 | 4411 | 1703058 | CCCUUGGAAAU | 1624 |
| | | UUCCAAGGGGG | | | | | GGUUCUUUUA | |
| 1703062 | 1703060 | UCUGGGACUGGG | 1226 | 4403 | 4424 | 1703061 | UUCUUUUCCCCC | 1625 |
| | | GGAAAAGAACC | | | | | AGUCCCAGA | |
| 1703065 | 1703063 | UCAUGGCUUCCA | 1227 | 4415 | 4436 | 1703064 | AGUCCCAGCUG | 1626 |
| | | GCUGGGACUGG | | | | | GAAGCCAUGA | |
| 1703068 | 1703066 | UCAGCAGAACAG | 1228 | 4430 | 4451 | 1703067 | CCAUGCUGUCU | 1627 |
| | | ACAGCAUGGCU | | | | | GUUCUGCUGA | |
| 1703071 | 1703069 | UUAUGUUCAGCU | 1229 | 4445 | 4466 | 1703070 | UGCUGGAGCAG | 1628 |
| | | GCUCCAGCAGA | | | | | CUGAACAUAA | |
| 1703074 | 1703072 | UGGCAACAUCUA | 1230 | 4460 | 4481 | 1703073 | ACAUAUACAUA | 1629 |
| | | UGUAUAUGUUC | | | | | GAUGUUGCCA | |
| 1703077 | 1703075 | UUGCAGAUGGGG | 1231 | 4478 | 4499 | 1703076 | CCCUGCCCUCCC | 1630 |
| | | AGGGCAGGGCA | | | | | CAUCUGCAA | |
| 1703080 | 1703078 | UACUACAACUCA | 1232 | 4495 | 4516 | 1703079 | GCACCCUGUUG | 1631 |
| | | ACAGGGUGCAG | | | | | AGUUGUAGUA | |
| 1703089 | 1703087 | UUAUCAUAGUCA | 1233 | 4540 | 4561 | 1703088 | UCACCAGAGUG | 1632 |
| | | CUCUGGUGAAU | | | | | ACUAUGAUAA | |
| 1703095 | 1703093 | UGGUUAGAAACC | 1234 | 4608 | 4629 | 1703094 | UUGUAAAGAGG | 1633 |
| | | UCUUUACAAGC | | | | | UUUCUAACCA | |
| 1703098 | 1703096 | UCUCGUGAGGGU | 1235 | 4620 | 4641 | 1703097 | UUCUAACCCACC | 1634 |
| | | GGGUUAGAAAC | | | | | CUCACGAGA | |
| 1703101 | 1703099 | UCAGUGUGGGGG | 1236 | 4641 | 4662 | 1703100 | UGUCUCUCACCC | 1635 |
| | | UGAGAGACACC | | | | | CCACACUGA | |
| 1703104 | 1703102 | UACAGGCCACAC | 1237 | 4658 | 4679 | 1703103 | CUGGGACUCGU | 1636 |
| | | GAGUCCCAGUG | | | | | GUGGCCUGUA | |
| 1703107 | 1703105 | UCAGCAGGGUGG | 1238 | 4675 | 4696 | 1703106 | UGUGUGGUGCC | 1637 |
| | | CACCACACAGG | | | | | ACCCUGCUGA | |
| 1703110 | 1703108 | UAGCCUUUCAAA | 1239 | 4699 | 4720 | 1703109 | CUCCCAAGUUU | 1638 |
| | | ACUUGGGAGGC | | | | | UGAAAGGCUA | |
| 1703113 | 1703111 | UCAGGUGCUGAG | 1240 | 4713 | 4734 | 1703112 | AAGGCUUUCCU | 1639 |
| | | GAAAGCCUUUC | | | | | CAGCACCUGA | |
| 1703116 | 1703114 | UUCUCUGUUGGG | 1241 | 4727 | 4748 | 1703115 | CACCUGGGACCC | 1640 |
| | | UCCCAGGUGCU | | | | | AACAGAGAA | |
| 1703119 | 1703117 | UGCUGCUAGAAG | 1242 | 4742 | 4763 | 1703118 | AGAGACCAGCU | 1641 |
| | | CUGGUCUCUGU | | | | | UCUAGCAGCA | |
| 1703122 | 1703120 | UUGAACGGCCUC | 1243 | 4757 | 4778 | 1703121 | GCAGCUAAGGA | 1642 |
| | | CUUAGCUGCUA | | | | | GGCCGUUCAA | |
| 1703125 | 1703123 | UGCCUUCGUCAC | 1244 | 4771 | 4792 | 1703124 | CGUUCAGCUGU | 1643 |
| | | AGCUGAACGGC | | | | | GACGAAGGCA | |
| 1703128 | 1703126 | UAUCCUGUGCUU | 1245 | 4785 | 4806 | 1703127 | GAAGGCCUGAA | 1644 |
| | | CAGGCCUUCGU | | | | | GCACAGGAUA | |
| 1703131 | 1703129 | UAUCGCUUCAGU | 1246 | 4800 | 4821 | 1703130 | AGGAUUAGGAC | 1645 |
| | | CCUAAUCCUGU | | | | | UGAAGCGAUA | |
| 1703137 | 1703135 | UCACAGGGAGCC | 1247 | 4838 | 4859 | 1703136 | UCCCCUUGGGGC | 1646 |
| | | CCAAGGGGAAG | | | | | UCCCUGUGA | |
| 1703140 | 1703138 | UAAGACCUAGUC | 1248 | 4859 | 4880 | 1703139 | CAGGGCACAGA | 1647 |
| | | UGUGCCCUGAC | | | | | CUAGGUCUUA | |
| 1703143 | 1703141 | UAGACCAGCCAC | 1249 | 4870 | 4891 | 1703142 | CUAGGUCUUGU | 1648 |
| | | AAGACCUAGUC | | | | | GGCUGGUCUA | |
| 1703146 | 1703144 | UAUCCUCGCGCC | 1250 | 4888 | 4909 | 1703145 | CUGGCUUGCGG | 1649 |
| | | GCAAGCCAGAC | | | | | CGCGAGGAUA | |
| 1703152 | 1703150 | UGGGCUAUGACC | 1251 | 4909 | 4930 | 1703151 | GUUCUCUCUGG | 1650 |
| | | AGAGAGAACCA | | | | | UCAUAGCCCA | |
| 1703155 | 1703153 | UCUGCCAUGAGA | 1252 | 4924 | 4945 | 1703154 | AGCCCGAAGUC | 1651 |
| | | CUUCGGGCUAU | | | | | UCAUGGCAGA | |
| 1703161 | 1703159 | UUGAUGCAGGAG | 1253 | 4954 | 4975 | 1703160 | GGCUUACAACU | 1652 |
| | | UUGUAAGCCUC | | | | | CCUGCAUCAA | |
| 1703164 | 1703162 | UGCUUCCUUUUU | 1254 | 4969 | 4990 | 1703163 | CAUCACAAGAA | 1653 |
| | | CUUGUGAUGCA | | | | | AAAGGAAGCA | |
| 1703167 | 1703165 | UGCUGGCAGUGG | 1255 | 4979 | 5000 | 1703166 | AAAAGGAAGCC | 1654 |
| | | CUUCCUUUUUC | | | | | ACUGCCAGCA | |
| 1703170 | 1703168 | UGAGCUGCAGAU | 1256 | 4997 | 5018 | 1703169 | GCUGGGGGGAU | 1655 |
| | | CCCCCCAGCUG | | | | | CUGCAGCUCA | |
| 1703173 | 1703171 | UCUCACGGAGCU | 1257 | 5013 | 5034 | 1703172 | GCUCCCAGAAGC | 1656 |
| | | UCUGGGAGCUG | | | | | UCCGUGAGA | |
| 1703176 | 1703174 | UUGAGGGGUGGC | 1258 | 5029 | 5050 | 1703175 | UGAGCCUCAGCC | 1657 |
| | | UGAGGCUCACG | | | | | ACCCCUCAA | |
| 1703179 | 1703177 | UCUUGGAGAGGA | 1259 | 5048 | 5069 | 1703178 | AGACUGGGUUC | 1658 |
| | | ACCCAGUCUGA | | | | | CUCUCCAAGA | |
| 1703185 | 1703183 | UGGCAAUUCAUC | 1260 | 5122 | 5143 | 1703184 | AGGGAUUGGGA | 1659 |
| | | CCAAUCCCUGC | | | | | UGAAUUGCCA | |
| 1703188 | 1703186 | UAGCAGAUCCAG | 1261 | 5137 | 5158 | 1703187 | UUGCCUGUCCU | 1660 |
| | | GACAGGCAAUU | | | | | GGAUCUGCUA | |
| 1703194 | 1703192 | UAGGCAGGCAGC | 1262 | 5160 | 5181 | 1703193 | GAGGCCCAAGC | 1661 |
| | | UUGGGCCUCUA | | | | | UGCCUGCCUA | |
| 1703200 | 1703198 | UUGUCUCCUGAC | 1263 | 5191 | 5212 | 1703199 | ACUUGACAAGU | 1662 |
| | | UUGUCAAGUCA | | | | | CAGGAGACAA | |
| 1703203 | 1703201 | UAGGCUUUGGGA | 1264 | 5206 | 5227 | 1703202 | AGACACUGUUC | 1663 |
| | | ACAGUGUCUCC | | | | | CCAAAGCCUA | |
| 1703206 | 1703204 | UGUGCUCUGGUC | 1265 | 5218 | 5239 | 1703205 | CAAAGCCUUGA | 1664 |
| | | AAGGCUUUGGG | | | | | CCAGAGCACA | |
| 1703209 | 1703207 | UUCAGCGGGCUG | 1266 | 5231 | 5252 | 1703208 | AGAGCACCUCA | 1665 |
| | | AGGUGCUCUGG | | | | | GCCCGCUGAA | |
| 1703212 | 1703210 | UAUGGAGUUUGU | 1267 | 5248 | 5269 | 1703211 | UGACCUUGCAC | 1666 |
| | | GCAAGGUCAGC | | | | | AAACUCCAUA | |
| 1703218 | 1703216 | UAAGGCGGCUUC | 1268 | 5278 | 5299 | 1703217 | GAGAAAAGGGA | 1667 |
| | | CCUUUUCUCAU | | | | | AGCCGCCUUA | |
| 1703221 | 1703219 | UCAGCAAUGUUU | 1269 | 5293 | 5314 | 1703220 | GCCUUUGCAAA | 1668 |
| | | UGCAAAGGCGG | | | | | ACAUUGCUGA | |
| 1703224 | 1703222 | UCUGAGUUUCUU | 1270 | 5308 | 5329 | 1703223 | UGCUGCCUAAA | 1669 |
| | | UAGGCAGCAAU | | | | | GAAACUCAGA | |
| 1703230 | 1703228 | UAGUGGCAGAAU | 1271 | 5333 | 5354 | 1703229 | UCAGGCCCAAU | 1670 |
| | | UGGGCCUGAGG | | | | | UCUGCCACUA | |
| 1703233 | 1703231 | UUGUACCCAAAC | 1272 | 5348 | 5369 | 1703232 | CCACUUCUGGU | 1671 |
| | | CAGAAGUGGCA | | | | | UUGGGUACAA | |
| 1703236 | 1703234 | UAGGGUUGCCUU | 1273 | 5363 | 5384 | 1703235 | GUACAGUUAAA | 1672 |
| | | UAACUGUACCC | | | | | GGCAACCCUA | |
| 1703242 | 1703240 | UGCCCUGGAUUU | 1274 | 5391 | 5412 | 1703241 | UGGCAGUAGAA | 1673 |
| | | CUACUGCCAAG | | | | | AUCCAGGGCA | |
| 1703245 | 1703243 | UAGCUGCCAGCC | 1275 | 5411 | 5432 | 1703244 | CUCCCCUGGGGC | 1674 |
| | | CCAGGGGAGGC | | | | | UGGCAGCUA | |
| 1703248 | 1703246 | UUAAAGCUCUAG | 1276 | 5432 | 5453 | 1703247 | CGUGUGCAGCU | 1675 |
| | | CUGCACACGAA | | | | | AGAGCUUUAA | |
| 1703251 | 1703249 | UAGACUUCCUUU | 1277 | 5447 | 5468 | 1703250 | CUUUACCUGAA | 1676 |
| | | CAGGUAAAGCU | | | | | AGGAAGUCUA | |
| 1703254 | 1703252 | UUUCUGGGCCCA | 1278 | 5459 | 5480 | 1703253 | GGAAGUCUCUG | 1677 |
| | | GAGACUUCCUU | | | | | GGCCCAGAAA | |
| 1703257 | 1703255 | UUUGGUGGAGAG | 1279 | 5470 | 5491 | 1703256 | GGCCCAGAACUC | 1678 |
| | | UUCUGGGCCCA | | | | | UCCACCAAA | |
| 1703260 | 1703258 | UGGAGGCUCUUG | 1280 | 5478 | 5499 | 1703259 | ACUCUCCACCAA | 1679 |
| | | GUGGAGAGUUC | | | | | GAGCCUCCA | |
| 1703275 | 1703273 | UUUUCCUUCUCC | 1281 | 5540 | 5561 | 1703274 | AUCUGAGAAGG | 1680 |
| | | UUCUCAGAUCC | | | | | AGAAGGAAAA | |
| 1703278 | 1703276 | UCAAAUCUACCC | 1282 | 5555 | 5576 | 1703277 | GGAAAUGUGGG | 1681 |
| | | CACAUUUCCUU | | | | | GUAGAUUUGA | |
| 1703284 | 1703282 | UUAAUGAGGGGG | 1283 | 5585 | 5606 | 1703283 | GAGAUAUGCCC | 1682 |
| | | GCAUAUCUCUA | | | | | CCCUCAUUAA | |
| 1703287 | 1703285 | UCGAAACUGUUG | 1284 | 5600 | 5621 | 1703286 | CAUUACUGCCA | 1683 |
| | | GCAGUAAUGAG | | | | | ACAGUUUCGA | |
| 1703290 | 1703288 | UGUGAAGAAAUG | 1285 | 5615 | 5636 | 1703289 | UUUCGGCUGCA | 1684 |
| | | CAGCCGAAACU | | | | | UUUCUUCACA | |
| 1703293 | 1703291 | UGAGGAACCGAG | 1286 | 5630 | 5651 | 1703292 | UUCACGCACCUC | 1685 |
| | | GUGCGUGAAGA | | | | | GGUUCCUCA | |
| 1703296 | 1703294 | UCAAGAACUUCA | 1287 | 5645 | 5666 | 1703295 | UCCUCUUCCUGA | 1686 |
| | | GGAAGAGGAAC | | | | | AGUUCUUGA | |
| 1703299 | 1703297 | UUGAAGAGCAGG | 1288 | 5659 | 5680 | 1703298 | UUCUUGUGCCC | 1687 |
| | | GCACAAGAACU | | | | | UGCUCUUCAA | |
| 1703302 | 1703300 | UAGGCCCAUGGU | 1289 | 5672 | 5693 | 1703301 | CUCUUCAGCACC | 1688 |
| | | GCUGAAGAGCA | | | | | AUGGGCCUA | |
| 1703305 | 1703303 | UGCCUUCCGUAU | 1290 | 5687 | 5708 | 1703304 | GGCCUUCUUAU | 1689 |
| | | AAGAAGGCCCA | | | | | ACGGAAGGCA | |
| 1703308 | 1703306 | UGAUCCCAGAGC | 1291 | 5696 | 5717 | 1703307 | AUACGGAAGGC | 1690 |
| | | CUUCCGUAUAA | | | | | UCUGGGAUCA | |
| 1703311 | 1703309 | UGAGCCUGCCCC | 1292 | 5717 | 5738 | 1703310 | CCCCCUUGUGGG | 1691 |
| | | ACAAGGGGGAG | | | | | GCAGGCUCA | |
| 1703317 | 1703315 | UAGCACUGAUCA | 1293 | 5758 | 5779 | 1703316 | GGUUUAGGGUG | 1692 |
| | | CCCUAAACCAU | | | | | AUCAGUGCUA | |
| 1703323 | 1703321 | UAAGCCAGCGUG | 1294 | 5788 | 5809 | 1703322 | UUGAAAAGGCA | 1693 |
| | | CCUUUUCAAUU | | | | | CGCUGGCUUA | |
| 1703326 | 1703324 | UCUCAUUUAAGA | 1295 | 5803 | 5824 | 1703325 | GGCUUGUGAUC | 1694 |
| | | UCACAAGCCAG | | | | | UUAAAUGAGA | |
| 1703332 | 1703328 | UGGGGGAUUGUC | 1296 | 5814 | 5835 | 1703331 | UUAAAUGAGGA | 1695 |
| | | CUCAUUUAAGA | | | | | CAAUCCCCCA | |
| 1703335 | 1703333 | UGGGAGGAGUGC | 1297 | 5834 | 5855 | 1703334 | CAGGGCUGGGC | 1696 |
| | | CCAGCCCUGGG | | | | | ACUCCUCCCA | |
| 1703341 | 1703339 | UCACUGGCUCUG | 1298 | 5867 | 5888 | 1703340 | UCCCACCUGCAG | 1697 |
| | | CAGGUGGGAGA | | | | | AGCCAGUGA | |
| 1703344 | 1703342 | UUAUCCUAUCUA | 1299 | 5891 | 5912 | 1703343 | UGGGUGGGCUA | 1698 |
| | | GCCCACCCAAG | | | | | GAUAGGAUAA | |
| 1703347 | 1703345 | UAGCCGGCAUAC | 1300 | 5906 | 5927 | 1703346 | GGAUAUACUGU | 1699 |
| | | AGUAUAUCCUA | | | | | AUGCCGGCUA | |
| 1703350 | 1703348 | UUCAGCAGCUUG | 1301 | 5921 | 5942 | 1703349 | CGGCUCCUUCAA | 1700 |
| | | AAGGAGCCGGC | | | | | GCUGCUGAA | |
| 1703353 | 1703351 | UUAUUGAUAAAG | 1302 | 5936 | 5957 | 1703352 | GCUGACUCACU | 1701 |
| | | UGAGUCAGCAG | | | | | UUAUCAAUAA | |
| 1703359 | 1703357 | UUCUCACCACUG | 1303 | 5966 | 5987 | 1703358 | AAUUGACUUCA | 1702 |
| | | AAGUCAAUUUA | | | | | GUGGUGAGAA | |
| 1703362 | 1703360 | UGCAAACAGGAU | 1304 | 5981 | 6002 | 1703361 | UGAGACUGUAU | 1703 |
| | | ACAGUCUCACC | | | | | CCUGUUUGCA | |
| 1703365 | 1703363 | UGCACAACAAGC | 1305 | 5996 | 6017 | 1703364 | UUUGCUAUUGC | 1704 |
| | | AAUAGCAAACA | | | | | UUGUUGUGCA | |
| 1703377 | 1703375 | UUCCCUUUGCCC | 1306 | 6047 | 6068 | 1703376 | AGUUAACAUGG | 1705 |
| | | AUGUUAACUAU | | | | | GCAAAGGGAA | |
| 1703380 | 1703378 | UCUGCACCCCAA | 1307 | 6062 | 6083 | 1703379 | AGGGAGAUCUU | 1706 |
| | | GAUCUCCCUUU | | | | | GGGGUGCAGA | |
| 1703383 | 1703381 | UGAGGCAGUUUA | 1308 | 6077 | 6098 | 1703382 | UGCAGCACUUA | 1707 |
| | | AGUGCUGCACC | | | | | AACUGCCUCA | |
| 1703389 | 1703387 | UAAAUGUGGUUG | 1309 | 6107 | 6128 | 1703388 | UCAUGAUUUCA | 1708 |
| | | AAAUCAUGAAA | | | | | ACCACAUUUA | |
| 1703398 | 1703396 | UUCUAACUCCGU | 1310 | 6138 | 6159 | 1703397 | GGAGCAGCCAC | 1709 |
| | | GGCUGCUCCCU | | | | | GGAGUUAGAA | |
| 1703401 | 1703399 | UAAAGAGAAACC | 1311 | 6158 | 6179 | 1703400 | GGCCCUUGGGG | 1710 |
| | | CCAAGGGCCUC | | | | | UUUCUCUUUA | |
| 1703404 | 1703402 | UAGCCUGUCAGU | 1312 | 6172 | 6193 | 1703403 | CUCUUUUCCACU | 1711 |
| | | GGAAAAGAGAA | | | | | GACAGGCUA | |
| 1703407 | 1703405 | UCAGCUGCCUGG | 1313 | 6186 | 6207 | 1703406 | CAGGCUUUCCCA | 1712 |
| | | GAAAGCCUGUC | | | | | GGCAGCUGA | |
| 1703410 | 1703408 | UAGGGAAUGAAC | 1314 | 6201 | 6222 | 1703409 | AGCUGGCUAGU | 1713 |
| | | UAGCCAGCUGC | | | | | UCAUUCCCUA | |
| 1703413 | 1703411 | UCCUGCACCUGG | 1315 | 6218 | 6239 | 1703412 | CCUCCCCAGCCA | 1714 |
| | | CUGGGGAGGGA | | | | | GGUGCAGGA | |
| 1703416 | 1703414 | UUGUCCAUAUUC | 1316 | 6234 | 6255 | 1703415 | CAGGCGUAGGA | 1715 |
| | | CUACGCCUGCA | | | | | AUAUGGACAA | |
| 1703419 | 1703417 | UCCAAAGCAACC | 1317 | 6248 | 6269 | 1703418 | UGGACAUCUGG | 1716 |
| | | AGAUGUCCAUA | | | | | UUGCUUUGGA | |
| 1703422 | 1703420 | UGAGGGCAGCAG | 1318 | 6260 | 6281 | 1703421 | UGCUUUGGCCU | 1717 |
| | | GCCAAAGCAAC | | | | | GCUGCCCUCA | |
| 1703425 | 1703423 | UGGACCCCUGAA | 1319 | 6272 | 6293 | 1703424 | CUGCCCUCUUUC | 1718 |
| | | AGAGGGCAGCA | | | | | AGGGGUCCA | |
| 1703428 | 1703426 | UAUGAUUGUGGG | 1320 | 6287 | 6308 | 1703427 | GGUCCUAAGCCC | 1719 |
| | | CUUAGGACCCC | | | | | ACAAUCAUA | |
| 1703431 | 1703429 | UAGGUCUUAGGG | 1321 | 6302 | 6323 | 1703430 | AUCAUGCCUCCC | 1720 |
| | | AGGCAUGAUUG | | | | | UAAGACCUA | |
| 1703434 | 1703432 | UGAGGGAAGGAU | 1322 | 6317 | 6338 | 1703433 | GACCUUGGCAU | 1721 |
| | | GCCAAGGUCUU | | | | | CCUUCCCUCA | |
| 1703437 | 1703435 | UGUGCCAACGGC | 1323 | 6331 | 6352 | 1703436 | UCCCUCUAAGCC | 1722 |
| | | UUAGAGGGAAG | | | | | GUUGGCACA | |
| 1703440 | 1703438 | UAGGUGGCACAG | 1324 | 6344 | 6365 | 1703439 | UUGGCACCUCU | 1723 |
| | | AGGUGCCAACG | | | | | GUGCCACCUA | |
| 1703446 | 1703444 | UACAGGCUGUGU | 1325 | 6373 | 6394 | 1703445 | GCUCCAGACACA | 1724 |
| | | GUCUGGAGCCA | | | | | CAGCCUGUA | |
| 1703452 | 1703450 | UGGUGAAGCGAG | 1326 | 6403 | 6424 | 1703451 | CUGAGAUCACU | 1725 |
| | | UGAUCUCAGCU | | | | | CGCUUCACCA | |
| 1703455 | 1703453 | UAACAAAGAUGA | 1327 | 6418 | 6439 | 1703454 | UCACCCUCCUCA | 1726 |
| | | GGAGGGUGAAG | | | | | UCUUUGUUA | |
| 1703458 | 1703456 | UUGGCUUUACUU | 1328 | 6433 | 6454 | 1703457 | UUGUUCUCCAA | 1727 |
| | | GGAGAACAAAG | | | | | GUAAAGCCAA | |
| 1703470 | 1703468 | UAGAAAUCAGAA | 1329 | 6512 | 6533 | 1703469 | UCAUAAAACUU | 1728 |
| | | GUUUUAUGAAG | | | | | CUGAUUUCUA | |
| 1703473 | 1703471 | UUUUUCAAAGCU | 1330 | 6527 | 6548 | 1703472 | UUUCUCUUCAG | 1729 |
| | | GAAGAGAAAUC | | | | | CUUUGAAAAA | |
| 1703476 | 1703474 | UCCCAGGGUAAC | 1331 | 6540 | 6561 | 1703475 | UUGAAAAGGGU | 1730 |
| | | CCUUUUCAAAG | | | | | UACCCUGGGA | |
| 1703479 | 1703477 | UGGCUCUAGGCC | 1332 | 6555 | 6576 | 1703478 | CUGGGCACUGG | 1731 |
| | | AGUGCCCAGGG | | | | | CCUAGAGCCA | |
| 1703482 | 1703480 | UAGUCUAUUAGG | 1333 | 6572 | 6593 | 1703481 | GCCUCACCUCCU | 1732 |
| | | AGGUGAGGCUC | | | | | AAUAGACUA | |
| 1703485 | 1703483 | UAAACUCAUGGG | 1334 | 6587 | 6608 | 1703484 | AGACUUAGCCCC | 1733 |
| | | GCUAAGUCUAU | | | | | AUGAGUUUA | |
| 1703491 | 1703489 | UAGUGCCAGAAA | 1335 | 6617 | 6638 | 1703490 | GCAGGACUAUU | 1734 |
| | | UAGUCCUGCUC | | | | | UCUGGCACUA | |
| 1703494 | 1703492 | UAUCAUGGGACU | 1336 | 6632 | 6653 | 1703493 | GCACUUGCAAG | 1735 |
| | | UGCAAGUGCCA | | | | | UCCCAUGAUA | |
| 1703497 | 1703495 | UAGAAUUACCGA | 1337 | 6647 | 6668 | 1703496 | AUGAUUUCUUC | 1736 |
| | | AGAAAUCAUGG | | | | | GGUAAUUCUA | |
| 1703500 | 1703498 | UCCCACCCUCAGA | 1338 | 6656 | 6677 | 1703499 | UCGGUAAUUCU | 1737 |
| | | AUUACCGAAG | | | | | GAGGGUGGGA | |
| 1703506 | 1703504 | UCUAAGAUGAUU | 1339 | 6680 | 6701 | 1703505 | GGGACAUGAAA | 1738 |
| | | UCAUGUCCCUC | | | | | UCAUCUUAGA | |
| 1703509 | 1703507 | UAGACAGAAAGC | 1340 | 6695 | 6716 | 1703508 | CUUAGCUUAGC | 1739 |
| | | UAAGCUAAGAU | | | | | UUUCUGUCUA | |
| 1703512 | 1703510 | UUAUAUAGACAU | 1341 | 6710 | 6731 | 1703511 | UGUCUGUGAAU | 1740 |
| | | UCACAGACAGA | | | | | GUCUAUAUAA | |
| 1703515 | 1703513 | UAAACACACAAU | 1342 | 6725 | 6746 | 1703514 | AUAUAGUGUAU | 1741 |
| | | ACACUAUAUAG | | | | | UGUGUGUUUA | |
| 1703533 | 1703531 | UAAAGUUCACCU | 1343 | 121 | 142 | 1703532 | UCGACUAUCAG | 1742 |
| | | GAUAGUCGACA | | | | | GUGAACUUUA | |
| 1703536 | 1703534 | UCUGGUUCAAAG | 1344 | 128 | 149 | 1703535 | UCAGGUGAACU | 1743 |
| | | UUCACCUGAUA | | | | | UUGAACCAGA | |
| 1703539 | 1703537 | UUCUUCCAUCAC | 1345 | 167 | 188 | 1703538 | GAGUUCGAAGU | 1744 |
| | | UUCGAACUCCU | | | | | GAUGGAAGAA | |
| 1703542 | 1703540 | UAACUUUGGAGA | 1346 | 1179 | 1200 | 1703541 | UGGAUUUCCUC | 1745 |
| | | GGAAAUCCACA | | | | | UCCAAAGUUA | |
| 1703548 | 1703546 | UAUUUCCACGUG | 1347 | 1274 | 1295 | 1703547 | UUCACGUUUCA | 1746 |
| | | AAACGUGAACU | | | | | CGUGGAAAUA | |
| 1703554 | 1703552 | UUCUUUGCUUUU | 1348 | 1505 | 1526 | 1703553 | AUGGUCAGUAA | 1747 |
| | | ACUGACCAUGC | | | | | AAGCAAAGAA | |
| 1703560 | 1703558 | UGAUGUCUUGGC | 1349 | 1541 | 1562 | 1703559 | GACAAAAAAGC | 1748 |
| | | UUUUUUGUCAU | | | | | CAAGACAUCA | |
| 1703563 | 1703561 | UCGUGUGGAUGU | 1350 | 1547 | 1568 | 1703562 | AAAGCCAAGAC | 1749 |
| | | CUUGGCUUUUU | | | | | AUCCACACGA | |
| 1703572 | 1703570 | UCAAGGCCUAUU | 1351 | 1580 | 1601 | 1703571 | ACCUUGAAAAA | 1750 |
| | | UUUCAAGGUUU | | | | | UAGGCCUUGA | |
| 1703575 | 1703573 | UGACGUAUUUAG | 1352 | 1680 | 1701 | 1703574 | CUUCCUCUCCUA | 1751 |
| | | GAGAGGAAGGU | | | | | AAUACGUCA | |
| 1703578 | 1703576 | UGUGACAGAAGA | 1353 | 1691 | 1712 | 1703577 | AAAUACGUCUC | 1752 |
| | | GACGUAUUUAG | | | | | UUCUGUCACA | |
| 1703590 | 1703588 | UUUAAUUAUCUG | 1354 | 2141 | 2162 | 1703589 | GGGAAGGUGCA | 1753 |
| | | CACCUUCCCGC | | | | | GAUAAUUAAA | |
| 1703593 | 1703591 | UCUUCUUAUUAA | 1355 | 2148 | 2169 | 1703592 | UGCAGAUAAUU | 1754 |
| | | UUAUCUGCACC | | | | | AAUAAGAAGA | |
| 1703596 | 1703594 | UAGAUCCAGCUU | 1356 | 2156 | 2177 | 1703595 | AUUAAUAAGAA | 1755 |
| | | CUUAUUAAUUA | | | | | GCUGGAUCUA | |
| 1703599 | 1703597 | UCGUUGCUAAGA | 1357 | 2164 | 2185 | 1703598 | GAAGCUGGAUC | 1756 |
| | | UCCAGCUUCUU | | | | | UUAGCAACGA | |
| 1703605 | 1703603 | UGGGACGUGUUU | 1358 | 2207 | 2228 | 1703604 | GAUAAUAUCAA | 1757 |
| | | GAUAUUAUCCU | | | | | ACACGUCCCA | |
| 1703611 | 1703609 | UUGGUUUGUAGA | 1359 | 2241 | 2262 | 1703610 | UGCAAAUAGUC | 1758 |
| | | CUAUUUGCACA | | | | | UACAAACCAA | |
| 1703623 | 1703621 | UAGUCAAGCUUC | 1360 | 2341 | 2362 | 1703622 | AAAAUCUGAGA | 1759 |
| | | UCAGAUUUUAC | | | | | AGCUUGACUA | |
| 1703626 | 1703624 | UCUCUGUCCUUG | 1361 | 2353 | 2374 | 1703625 | GCUUGACUUCA | 1760 |
| | | AAGUCAAGCUU | | | | | AGGACAGAGA | |
| 1703629 | 1703627 | UAAUCUUUUUAU | 1362 | 2418 | 2439 | 1703628 | GCGGAGGAAAU | 1761 |
| | | UUCCUCCGCCA | | | | | AAAAAGAUUA | |
| 1703635 | 1703633 | UGCUUGUGGGUU | 1363 | 2431 | 2452 | 1703634 | AAAGAUUGAAA | 1762 |
| | | UCAAUCUUUUU | | | | | CCCACAAGCA | |
| 1703638 | 1703636 | UUCUCCUCUCCAC | 1364 | 2669 | 2690 | 1703637 | CAAUAAUUGUG | 1763 |
| | | AAUUAUUGAC | | | | | GAGAGGAGAA | |
| 1703653 | 1703651 | UUUAAGUGAUUA | 1365 | 2766 | 2787 | 1703652 | UUAAUUGGUUA | 1764 |
| | | ACCAAUUAACC | | | | | AUCACUUAAA | |
| 1703659 | 1703657 | UCUCCCAUCACU | 1366 | 2818 | 2839 | 1703658 | UUCAAAAUCAG | 1765 |
| | | GAUUUUGAAGU | | | | | UGAUGGGAGA | |
| 1703665 | 1703663 | UAUGAAAUUUGC | 1367 | 2834 | 2855 | 1703664 | GGAGUAAGAGC | 1766 |
| | | UCUUACUCCCA | | | | | AAAUUUCAUA | |
| 1703674 | 1703672 | UCAUCAAUUUGG | 1368 | 2849 | 2870 | 1703673 | UUCAUCUUUCC | 1767 |
| | | AAAGAUGAAAU | | | | | AAAUUGAUGA | |
| 1703677 | 1703675 | UUUACUAGCCCA | 1369 | 2862 | 2883 | 1703676 | AUUGAUGGGUG | 1768 |
| | | CCCAUCAAUUU | | | | | GGCUAGUAAA | |
| 1703689 | 1703687 | UUGGCCAUGUUU | 1370 | 2899 | 2920 | 1703688 | AACAUUCAAAA | 1769 |
| | | UUGAAUGUUUU | | | | | ACAUGGCCAA | |
| 1703692 | 1703690 | UUUGGAUGUGGC | 1371 | 2906 | 2927 | 1703691 | AAAAACAUGGC | 1770 |
| | | CAUGUUUUUGA | | | | | CACAUCCAAA | |
| 1703695 | 1703693 | UAUUGCCUGAGG | 1372 | 2922 | 2943 | 1703694 | CCAACAUUUCCU | 1771 |
| | | AAAUGUUGGAU | | | | | CAGGCAAUA | |
| 1703698 | 1703696 | UAAAGGAAUUGC | 1373 | 2928 | 2949 | 1703697 | UUUCCUCAGGC | 1772 |
| | | CUGAGGAAAUG | | | | | AAUUCCUUUA | |
| 1703701 | 1703699 | UAAGAAUCAAAA | 1374 | 2936 | 2957 | 1703700 | GGCAAUUCCUU | 1773 |
| | | GGAAUUGCCUG | | | | | UUGAUUCUUA | |
| 1703704 | 1703702 | UGAAGAAAAAAG | 1375 | 2944 | 2965 | 1703703 | CUUUUGAUUCU | 1774 |
| | | AAUCAAAAGGA | | | | | UUUUUCUUCA | |
| 1703713 | 1703711 | UCAAGUUUCAAA | 1376 | 3086 | 3107 | 1703712 | AACAAAGGAUU | 1775 |
| | | UCCUUUGUUGC | | | | | UGAAACUUGA | |
| 1703716 | 1703714 | UAACACACCAAG | 1377 | 3093 | 3114 | 1703715 | GAUUUGAAACU | 1776 |
| | | UUUCAAAUCCU | | | | | UGGUGUGUUA | |
| 1703719 | 1703717 | UGUCUUUUCUAA | 1378 | 3462 | 3483 | 1703718 | AUGACCUCCUU | 1777 |
| | | GGAGGUCAUCC | | | | | AGAAAAGACA | |
| 1703722 | 1703720 | UAGGUCAGUCUU | 1379 | 3468 | 3489 | 1703721 | UCCUUAGAAAA | 1778 |
| | | UUCUAAGGAGG | | | | | GACUGACCUA | |
| 1703728 | 1703726 | UAUAAAACAGGG | 1380 | 3564 | 3585 | 1703727 | CCACAGAAACCC | 1779 |
| | | UUUCUGUGGAG | | | | | UGUUUUAUA | |
| 1703731 | 1703729 | UGAACUCAAUAA | 1381 | 3571 | 3592 | 1703730 | AACCCUGUUUU | 1780 |
| | | AACAGGGUUUC | | | | | AUUGAGUUCA | |
| 1703734 | 1703732 | UACCUUCAGAAC | 1382 | 3578 | 3599 | 1703733 | UUUUAUUGAGU | 1781 |
| | | UCAAUAAAACA | | | | | UCUGAAGGUA | |
| 1703737 | 1703735 | UAGUUCCAACCU | 1383 | 3585 | 3606 | 1703736 | GAGUUCUGAAG | 1782 |
| | | UCAGAACUCAA | | | | | GUUGGAACUA | |
| 1703740 | 1703738 | UCAAAGAGAACU | 1384 | 3645 | 3666 | 1703739 | GGGCUAACCAG | 1783 |
| | | GGUUAGCCCUA | | | | | UUCUCUUUGA | |
| 1703743 | 1703741 | UAGUCCUUACAA | 1385 | 3653 | 3674 | 1703742 | CAGUUCUCUUU | 1784 |
| | | AGAGAACUGGU | | | | | GUAAGGACUA | |
| 1703746 | 1703744 | UAGAGGCACAAG | 1386 | 3662 | 3683 | 1703745 | UUGUAAGGACU | 1785 |
| | | UCCUUACAAAG | | | | | UGUGCCUCUA | |
| 1703752 | 1703750 | UUCAGAUCAUGA | 1387 | 4034 | 4055 | 1703751 | CCACGAAUCUCA | 1786 |
| | | GAUUCGUGGUG | | | | | UGAUCUGAA | |
| 1703755 | 1703753 | UGAACCGAAUCA | 1388 | 4042 | 4063 | 1703754 | CUCAUGAUCUG | 1787 |
| | | GAUCAUGAGAU | | | | | AUUCGGUUCA | |
| 1703758 | 1703756 | UAAAGAACCAUU | 1389 | 4389 | 4410 | 1703757 | CCCCUUGGAAA | 1788 |
| | | UCCAAGGGGGU | | | | | UGGUUCUUUA | |
| 1703761 | 1703759 | UUAUGUAUAUGU | 1390 | 4451 | 4472 | 1703760 | AGCAGCUGAAC | 1789 |
| | | UCAGCUGCUCC | | | | | AUAUACAUAA | |
| 1703764 | 1703762 | UAACAUCUAUGU | 1391 | 4457 | 4478 | 1703763 | UGAACAUAUAC | 1790 |
| | | AUAUGUUCAGC | | | | | AUAGAUGUUA | |
| 1703767 | 1703765 | UUCCAACUACAA | 1392 | 4499 | 4520 | 1703766 | CCUGUUGAGUU | 1791 |
| | | CUCAACAGGGU | | | | | GUAGUUGGAA | |
| 1703770 | 1703768 | UCAGACAAAUCC | 1393 | 4507 | 4528 | 1703769 | GUUGUAGUUGG | 1792 |
| | | AACUACAACUC | | | | | AUUUGUCUGA | |
| 1703773 | 1703771 | UGCAUAAACAGA | 1394 | 4514 | 4535 | 1703772 | UUGGAUUUGUC | 1793 |
| | | CAAAUCCAACU | | | | | UGUUUAUGCA | |
| 1703776 | 1703774 | UAAUCCAAGCAU | 1395 | 4521 | 4542 | 1703775 | UGUCUGUUUAU | 1794 |
| | | AAACAGACAAA | | | | | GCUUGGAUUA | |
| 1703779 | 1703777 | UCUCUGGUGAAU | 1396 | 4529 | 4550 | 1703778 | UAUGCUUGGAU | 1795 |
| | | CCAAGCAUAAA | | | | | UCACCAGAGA | |
| 1703782 | 1703780 | UAUAGUCACUCU | 1397 | 4536 | 4557 | 1703781 | GGAUUCACCAG | 1796 |
| | | GGUGAAUCCAA | | | | | AGUGACUAUA | |
| 1703785 | 1703783 | UAGCAUUUCAAG | 1398 | 4589 | 4610 | 1703784 | CGCAUGUAUCU | 1797 |
| | | AUACAUGCGUC | | | | | UGAAAUGCUA | |
| 1703788 | 1703786 | UUCUUUACAAGC | 1399 | 4597 | 4618 | 1703787 | UCUUGAAAUGC | 1798 |
| | | AUUUCAAGAUA | | | | | UUGUAAAGAA | |
| 1703794 | 1703792 | UGGGUGGGUUAG | 1400 | 4613 | 4634 | 1703793 | AAGAGGUUUCU | 1799 |
| | | AAACCUCUUUA | | | | | AACCCACCCA | |
| 1703797 | 1703795 | UAGGAAAGCCUU | 1401 | 4704 | 4725 | 1703796 | AAGUUUUGAAA | 1800 |
| | | UCAAAACUUGG | | | | | GGCUUUCCUA | |
| 1703809 | 1703807 | UCUUGUCAAGUC | 1402 | 5181 | 5202 | 1703808 | AGGAAGGAUGA | 1801 |
| | | AUCCUUCCUCA | | | | | CUUGACAAGA | |
| 1703815 | 1703813 | UAGUUUCUUUAG | 1403 | 5305 | 5326 | 1703814 | CAUUGCUGCCU | 1802 |
| | | GCAGCAAUGUU | | | | | AAAGAAACUA | |
| 1703818 | 1703816 | UUUUAACUGUAC | 1404 | 5354 | 5375 | 1703817 | CUGGUUUGGGU | 1803 |
| | | CCAAACCAGAA | | | | | ACAGUUAAAA | |
| 1703827 | 1703825 | UAUCCCUUCAAC | 1405 | 5522 | 5543 | 1703826 | UUCUCCUAAGU | 1804 |
| | | UUAGGAGAAUU | | | | | UGAAGGGAUA | |
| 1703830 | 1703828 | UUUCUCAGAUCC | 1406 | 5529 | 5550 | 1703829 | AAGUUGAAGGG | 1805 |
| | | CUUCAACUUAG | | | | | AUCUGAGAAA | |
| 1703833 | 1703831 | UACAUUUCCUUC | 1407 | 5543 | 5564 | 1703832 | UGAGAAGGAGA | 1806 |
| | | UCCUUCUCAGA | | | | | AGGAAAUGUA | |
| 1703845 | 1703843 | UUGAUCACCCUA | 1408 | 5753 | 5774 | 1703844 | AUCAUGGUUUA | 1807 |
| | | AACCAUGAUCU | | | | | GGGUGAUCAA | |
| 1703848 | 1703846 | UUUUAUCUGCCA | 1409 | 5768 | 5789 | 1703847 | GAUCAGUGCUG | 1808 |
| | | GCACUGAUCAC | | | | | GCAGAUAAAA | |
| 1703851 | 1703849 | UCCUUUUCAAUU | 1410 | 5777 | 5798 | 1703850 | UGGCAGAUAAA | 1809 |
| | | UAUCUGCCAGC | | | | | UUGAAAAGGA | |
| 1703854 | 1703852 | UCAGCGUGCCUU | 1411 | 5784 | 5805 | 1703853 | UAAAUUGAAAA | 1810 |
| | | UUCAAUUUAUC | | | | | GGCACGCUGA | |
| 1703857 | 1703855 | UAGCCAGCGUGC | 1412 | 5787 | 5808 | 1703856 | AUUGAAAAGGC | 1811 |
| | | CUUUUCAAUUU | | | | | ACGCUGGCUA | |
| 1703869 | 1703867 | UGGCAUACAGUA | 1413 | 5902 | 5923 | 1703868 | GAUAGGAUAUA | 1812 |
| | | UAUCCUAUCUA | | | | | CUGUAUGCCA | |
| 1703875 | 1703873 | UGAACUAUUGAU | 1414 | 5940 | 5961 | 1703874 | ACUCACUUUAU | 1813 |
| | | AAAGUGAGUCA | | | | | CAAUAGUUCA | |
| 1703878 | 1703876 | UUUUAAAUGGAA | 1415 | 5948 | 5969 | 1703877 | UAUCAAUAGUU | 1814 |
| | | CUAUUGAUAAA | | | | | CCAUUUAAAA | |
| 1703881 | 1703879 | UAAGUCAAUUUA | 1416 | 5955 | 5976 | 1703880 | AGUUCCAUUUA | 1815 |
| | | AAUGGAACUAU | | | | | AAUUGACUUA | |
| 1703884 | 1703882 | UACCACUGAAGU | 1417 | 5962 | 5983 | 1703883 | UUUAAAUUGAC | 1816 |
| | | CAAUUUAAAUG | | | | | UUCAGUGGUA | |
| 1703890 | 1703888 | UAAUAGCAAACA | 1418 | 5985 | 6006 | 1703889 | ACUGUAUCCUG | 1817 |
| | | GGAUACAGUCU | | | | | UUUGCUAUUA | |
| 1703893 | 1703891 | UAACAAGCAAUA | 1419 | 5992 | 6013 | 1703892 | CCUGUUUGCUA | 1818 |
| | | GCAAACAGGAU | | | | | UUGCUUGUUA | |
| 1703896 | 1703894 | UAUAGCACAACA | 1420 | 5999 | 6020 | 1703895 | GCUAUUGCUUG | 1819 |
| | | AGCAAUAGCAA | | | | | UUGUGCUAUA | |
| 1703899 | 1703897 | UAUGUUAACUAU | 1421 | 6036 | 6057 | 1703898 | AUGUGUAAGAU | 1820 |
| | | CUUACACAUUC | | | | | AGUUAACAUA | |
| 1703902 | 1703900 | UCUUUGCCCAUG | 1422 | 6044 | 6065 | 1703901 | GAUAGUUAACA | 1821 |
| | | UUAACUAUCUU | | | | | UGGGCAAAGA | |
| 1703905 | 1703903 | UUCUCCCUUUGC | 1423 | 6049 | 6070 | 1703904 | UUAACAUGGGC | 1822 |
| | | CCAUGUUAACU | | | | | AAAGGGAGAA | |
| 1703911 | 1703909 | UAAAUCAUGAAA | 1424 | 6096 | 6117 | 1703910 | CGUAACCCUUU | 1823 |
| | | AGGGUUACGAG | | | | | UCAUGAUUUA | |
| 1703917 | 1703915 | UUAGCAAAUGUG | 1425 | 6111 | 6132 | 1703916 | GAUUUCAACCA | 1824 |
| | | GUUGAAAUCAU | | | | | CAUUUGCUAA | |
| 1703920 | 1703918 | UACCAGAUGUCC | 1426 | 6240 | 6261 | 1703919 | UAGGAAUAUGG | 1825 |
| | | AUAUUCCUACG | | | | | ACAUCUGGUA | |
| 1703923 | 1703921 | UAAAGCAACCAG | 1427 | 6246 | 6267 | 1703922 | UAUGGACAUCU | 1826 |
| | | AUGUCCAUAUU | | | | | GGUUGCUUUA | |
| 1703926 | 1703924 | UUUUACUUGGAG | 1428 | 6429 | 6450 | 1703925 | AUCUUUGUUCU | 1827 |
| | | AACAAAGAUGA | | | | | CCAAGUAAAA | |
| 1703932 | 1703930 | UUUUUAUGAAGC | 1429 | 6500 | 6521 | 1703931 | AGACCUGCAGC | 1828 |
| | | UGCAGGUCUGU | | | | | UUCAUAAAAA | |
| 1703935 | 1703933 | UAAUCAGAAGUU | 1430 | 6509 | 6530 | 1703934 | GCUUCAUAAAA | 1829 |
| | | UUAUGAAGCUG | | | | | CUUCUGAUUA | |
| 1703944 | 1703942 | UACCCUUUUCAA | 1431 | 6531 | 6552 | 1703943 | UCUUCAGCUUU | 1830 |
| | | AGCUGAAGAGA | | | | | GAAAAGGGUA | |
| 1703950 | 1703948 | UAUAGUCCUGCU | 1432 | 6607 | 6628 | 1703949 | GCCAUGUUGAG | 1831 |
| | | CAACAUGGCAA | | | | | CAGGACUAUA | |
| 1703959 | 1703957 | UCCUCAGAAUUA | 1433 | 6651 | 6672 | 1703958 | UUUCUUCGGUA | 1832 |
| | | CCGAAGAAAUC | | | | | AUUCUGAGGA | |
| 1703962 | 1703960 | UUAAGCUAAGAU | 1434 | 6684 | 6705 | 1703961 | CAUGAAAUCAU | 1833 |
| | | GAUUUCAUGUC | | | | | CUUAGCUUAA | |
| 1703965 | 1703963 | UCAGAAAGCUAA | 1435 | 6692 | 6713 | 1703964 | CAUCUUAGCUU | 1834 |
| | | GCUAAGAUGAU | | | | | AGCUUUCUGA | |
| 1703971 | 1703969 | UUAGACAUUCAC | 1436 | 6706 | 6727 | 1703970 | UUUCUGUCUGU | 1835 |
| | | AGACAGAAAGC | | | | | GAAUGUCUAA | |
| 1703977 | 1703975 | UACACAAUACAC | 1437 | 6721 | 6742 | 1703976 | GUCUAUAUAGU | 1836 |
| | | UAUAUAGACAU | | | | | GUAUUGUGUA | |
| 1703983 | 1703981 | UAAUCAUUUGUU | 1438 | 6737 | 6758 | 1703982 | GUGUGUUUUAA | 1837 |
| | | AAAACACACAA | | | | | CAAAUGAUUA | |
| 1703989 | 1703987 | UCAACAGUCAGU | 1439 | 6751 | 6772 | 1703988 | AUGAUUUACAC | 1838 |
| | | GUAAAUCAUUU | | | | | UGACUGUUGA | |
| 1703992 | 1703990 | UUUUUACAGCAA | 1440 | 6759 | 6780 | 1703991 | CACUGACUGUU | 1839 |
| | | CAGUCAGUGUA | | | | | GCUGUAAAAA | |
| 1703995 | 1703993 | UAAAUUCACUUU | 1441 | 6767 | 6788 | 1703994 | GUUGCUGUAAA | 1840 |
| | | UACAGCAACAG | | | | | AGUGAAUUUA | |
| 1704001 | 1703999 | UUAAUAACUUUA | 1442 | 6783 | 6804 | 1704000 | AUUUGGAAAUA | 1841 |
| | | UUUCCAAAUUC | | | | | AAGUUAUUAA | |
| 1704004 | 1704002 | UAUCAGAGUAAU | 1443 | 6790 | 6811 | 1704003 | AAUAAAGUUAU | 1842 |
| | | AACUUUAUUUC | | | | | UACUCUGAUA | |

### Example 5: Effect of RNAi Compounds on Human MAPT RNA In Vitro, Single Dose

[0581] RNAi compounds described herein above were tested for their single dose effects on MAPT RNA in vitro. The RNAi compounds were tested in a series of experiments that had the same culture conditions.

[0582] Cultured A-172 cells were treated with RNAi compound at a concentration of 1 nM by LipofectAMINE RNAiMAX at a density of 10,000 cells per well. After a treatment period of 72 hours, total RNA was isolated from the cells and MAPT RNA levels were measured by quantitative real-time RTPCR. MAPT RNA was measured by human primer probe set RTS3104 (described herein above). MAPT RNA levels were normalized to total RNA content, as measured by RIBOGREEN®. Reduction of MAPT RNA is presented in the table below as percent MAPT RNA relative to the amount of MAPT RNA in untreated control cells (% UTC).

[0583] Each separate experiment described in this example is presented in a separate table. The values marked with a “†” indicate that the RNAi compound is complementary to the amplicon region of the primer probe set.

TABLE 23
Reduction of MAPT RNA by RNAi compounds
that target human MAPT nucleic acid

| Compound | MAPT |
|---|---|
| Number | (% UTC) |
| 1612982 | 30 |
| 1702345 | 30 |
| 1702369 | 77 |
| 1702384 | 44 |
| 1702411 | 59 |
| 1702444 | 78 |
| 1702483 | 75 |
| 1702504 | 69 |
| 1702534 | 70 |
| 1702537 | 81 |
| 1702555 | 83 |
| 1702639 | 46 |
| 1702642 | 77 |
| 1702684 | 65 |
| 1702690 | 57 |
| 1702696 | 65 |
| 1702705 | 49 |
| 1702732 | 49† |
| 1702744 | 74 |
| 1702750 | 72 |
| 1702792 | 32 |
| 1702804 | 58 |
| 1702810 | 61 |
| 1702816 | 39 |
| 1702846 | 58 |
| 1702861 | 57 |
| 1702870 | 83 |
| 1702927 | 69 |
| 1702957 | 59 |
| 1702966 | 57 |
| 1702975 | 67 |
| 1703011 | 87 |
| 1703032 | 81 |
| 1703050 | 71 |
| 1703080 | 58 |
| 1703098 | 84 |
| 1703119 | 81 |
| 1703182 | 93 |
| 1703188 | 65 |
| 1703197 | 77 |
| 1703206 | 81 |
| 1703230 | 66 |
| 1703239 | 85 |
| 1703248 | 64 |
| 1703272 | 66 |
| 1703278 | 66 |
| 1703299 | 55 |
| 1703335 | 83 |
| 1703380 | 62 |
| 1703383 | 68 |
| 1703389 | 60 |
| 1703392 | 79 |
| 1703413 | 84 |
| 1703416 | 72 |
| 1703422 | 85 |
| 1703431 | 83 |
| 1703473 | 56 |
| 1703515 | 48 |
| 1703518 | 51 |
| 1703521 | 70 |
| 1703545 | 92 |
| 1703611 | 40 |
| 1703653 | 39 |
| 1703656 | 37 |
| 1703665 | 51 |
| 1703671 | 24 |
| 1703686 | 51 |
| 1703707 | 96 |
| 1703716 | 51 |
| 1703740 | 49 |
| 1703764 | 56 |
| 1703773 | 50 |
| 1703779 | 79 |
| 1703791 | 59 |
| 1703797 | 63 |
| 1703842 | 73 |
| 1703914 | 57 |
| 1703917 | 59 |
| 1703950 | 58 |

TABLE 24
Reduction of MAPT RNA by RNAi compounds
that target human MAPT nucleic acid

| Compound | MAPT |
|---|---|
| Number | (% UTC) |
| 1612982 | 40 |
| 1702405 | 85 |
| 1702417 | 74 |
| 1702420 | 66 |
| 1702426 | 52 |
| 1702429 | 65 |
| 1702435 | 68 |
| 1702450 | 66 |
| 1702453 | 44 |
| 1702459 | 63 |
| 1702489 | 67 |
| 1702501 | 82 |
| 1702516 | 78 |
| 1702528 | 58 |
| 1702600 | 70 |
| 1702651 | 67 |
| 1702660 | 75 |
| 1702678 | 70 |
| 1702687 | 77 |
| 1702726 | 54† |
| 1702789 | 50 |
| 1702822 | 53 |
| 1702843 | 80 |
| 1702864 | 56 |
| 1702876 | 86 |
| 1702879 | 72 |
| 1702891 | 78 |
| 1702894 | 58 |
| 1702903 | 59 |
| 1702912 | 67 |
| 1702945 | 76 |
| 1702948 | 75 |
| 1702954 | 57 |
| 1702963 | 53 |
| 1702999 | 77 |
| 1703017 | 83 |
| 1703023 | 52 |
| 1703056 | 90 |
| 1703086 | 38 |
| 1703089 | 51 |
| 1703101 | 90 |
| 1703110 | 80 |
| 1703185 | 68 |
| 1703215 | 82 |
| 1703218 | 73 |
| 1703233 | 73 |
| 1703236 | 73 |
| 1703260 | 70 |
| 1703284 | 72 |
| 1703287 | 53 |
| 1703314 | 65 |
| 1703317 | 74 |
| 1703374 | 67 |
| 1703404 | 71 |
| 1703419 | 85 |
| 1703461 | 85 |
| 1703470 | 56 |
| 1703500 | 79 |
| 1703560 | 102 |
| 1703602 | 79 |
| 1703632 | 50† |
| 1703680 | 62 |
| 1703704 | 62 |
| 1703755 | 63 |
| 1703782 | 48 |
| 1703800 | 70 |
| 1703824 | 73 |
| 1703845 | 77 |
| 1703857 | 64 |
| 1703875 | 46 |
| 1703878 | 58 |
| 1703881 | 49 |
| 1703905 | 84 |
| 1703923 | 70 |
| 1703926 | 66 |
| 1703959 | 75 |
| 1703965 | 69 |
| 1703992 | 55 |
| 1703995 | 49 |

TABLE 25
Reduction of MAPT RNA by RNAi compounds
that target human MAPT nucleic acid

| Compound | MAPT |
|---|---|
| Number | (% UTC) |
| 1612982 | 83 |
| 1702357 | 52 |
| 1702366 | 52 |
| 1702372 | 86 |
| 1702387 | 42 |
| 1702393 | 94 |
| 1702402 | 88 |
| 1702423 | 69 |
| 1702486 | 73 |
| 1702492 | 75 |
| 1702507 | 83 |
| 1702525 | 155 |
| 1702531 | 94 |
| 1702552 | 95 |
| 1702561 | 56 |
| 1702564 | 75 |
| 1702567 | 81 |
| 1702594 | 71 |
| 1702597 | 34 |
| 1702630 | 86 |
| 1702654 | 75 |
| 1702669 | 83 |
| 1702672 | 56 |
| 1702798 | 85 |
| 1702885 | 72 |
| 1702897 | 82 |
| 1702939 | 76 |
| 1702960 | 77 |
| 1702981 | 72 |
| 1702987 | 72 |
| 1702990 | 89 |
| 1703053 | 76 |
| 1703062 | 67 |
| 1703083 | 61 |
| 1703104 | 68 |
| 1703107 | 83 |
| 1703140 | 72 |
| 1703143 | 88 |
| 1703152 | 83 |
| 1703173 | 84 |
| 1703176 | 71 |
| 1703179 | 55 |
| 1703254 | 80 |
| 1703269 | 54 |
| 1703275 | 72 |
| 1703281 | 52 |
| 1703311 | 54 |
| 1703323 | 88 |
| 1703341 | 71 |
| 1703362 | 72 |
| 1703398 | 94 |
| 1703401 | 65 |
| 1703479 | 82 |
| 1703482 | 47 |
| 1703512 | 70 |
| 1703524 | 38 |
| 1703587 | 75 |
| 1703596 | 95 |
| 1703605 | 92 |
| 1703647 | 94 |
| 1703662 | 94 |
| 1703674 | 71 |
| 1703710 | 51 |
| 1703725 | 41 |
| 1703728 | 71 |
| 1703731 | 56 |
| 1703734 | 45 |
| 1703737 | 75 |
| 1703746 | 75 |
| 1703758 | 50 |
| 1703761 | 61 |
| 1703770 | 63 |
| 1703776 | 65 |
| 1703794 | 60 |
| 1703854 | 57 |
| 1703896 | 46 |
| 1703962 | 49 |
| 1703983 | 68 |
| 1704004 | 57 |

TABLE 26
Reduction of MAPT RNA by RNAi compounds
that target human MAPT nucleic acid

| Compound | MAPT |
|---|---|
| Number | (% UTC) |
| 1612982 | 64 |
| 1702351 | 79 |
| 1702354 | 81 |
| 1702399 | 87 |
| 1702414 | 52 |
| 1702432 | 44 |
| 1702498 | 63 |
| 1702513 | 31 |
| 1702540 | 80 |
| 1702546 | 95 |
| 1702576 | 110 |
| 1702588 | 95 |
| 1702603 | 75 |
| 1702612 | 73 |
| 1702633 | 76 |
| 1702666 | 83 |
| 1702717 | 89 |
| 1702723 | 82 |
| 1702738 | 89† |
| 1702747 | 59 |
| 1702753 | 92 |
| 1702765 | 72 |
| 1702807 | 69 |
| 1702831 | 74 |
| 1702834 | 80 |
| 1702858 | 78 |
| 1702930 | 79 |
| 1702978 | 59 |
| 1703002 | 68 |
| 1703005 | 86 |
| 1703044 | 84 |
| 1703059 | 93 |
| 1703074 | 77 |
| 1703092 | 60 |
| 1703113 | 65 |
| 1703116 | 89 |
| 1703125 | 86 |
| 1703128 | 76 |
| 1703137 | 57 |
| 1703146 | 94 |
| 1703251 | 98 |
| 1703290 | 74 |
| 1703308 | 82 |
| 1703320 | 51 |
| 1703332 | 57 |
| 1703353 | 67 |
| 1703386 | 71 |
| 1703425 | 54 |
| 1703428 | 87 |
| 1703434 | 65 |
| 1703476 | 89 |
| 1703485 | 72 |
| 1703503 | 92 |
| 1703536 | 62 |
| 1703539 | 55 |
| 1703554 | 48 |
| 1703569 | 26 |
| 1703572 | 64 |
| 1703575 | 75 |
| 1703578 | 41 |
| 1703581 | 55 |
| 1703584 | 57 |
| 1703617 | 91 |
| 1703629 | 67† |
| 1703683 | 69 |
| 1703692 | 59 |
| 1703701 | 61 |
| 1703719 | 80 |
| 1703749 | 69 |
| 1703788 | 54 |
| 1703803 | 46 |
| 1703812 | 42 |
| 1703827 | 43 |
| 1703839 | 49 |
| 1703863 | 42 |
| 1703872 | 35 |
| 1703890 | 40 |
| 1703944 | 28 |
| 1703947 | 27 |

TABLE 27
Reduction of MAPT RNA by RNAi compounds
that target human MAPT nucleic acid

| Compound | MAPT |
|---|---|
| Number | (% UTC) |
| 1612982 | 55 |
| 1702348 | 82 |
| 1702378 | 47 |
| 1702390 | 77 |
| 1702396 | 76 |
| 1702447 | 38 |
| 1702456 | 66 |
| 1702468 | 77 |
| 1702474 | 79 |
| 1702558 | 77 |
| 1702585 | 80 |
| 1702618 | 120 |
| 1702621 | 141 |
| 1702648 | 60 |
| 1702708 | 55 |
| 1702711 | 102 |
| 1702756 | 102 |
| 1702759 | 56 |
| 1702780 | 83 |
| 1702783 | 114 |
| 1702786 | 23 |
| 1702795 | 32 |
| 1702801 | 39 |
| 1702819 | 37 |
| 1702840 | 78 |
| 1702867 | 65 |
| 1702873 | 63 |
| 1702882 | 70 |
| 1702900 | 67 |
| 1702909 | 98 |
| 1702918 | 52 |
| 1702951 | 68 |
| 1702969 | 60 |
| 1702972 | 77 |
| 1702993 | 65 |
| 1703014 | 99 |
| 1703038 | 54 |
| 1703071 | 17 |
| 1703122 | 65 |
| 1703131 | 49 |
| 1703155 | 96 |
| 1703158 | 72 |
| 1703161 | 59 |
| 1703164 | 53 |
| 1703194 | 65 |
| 1703203 | 51 |
| 1703209 | 77 |
| 1703221 | 72 |
| 1703227 | 73 |
| 1703296 | 44 |
| 1703356 | 41 |
| 1703365 | 49 |
| 1703443 | 78 |
| 1703449 | 73 |
| 1703458 | 55 |
| 1703467 | 52 |
| 1703494 | 41 |
| 1703533 | 29 |
| 1703557 | 53 |
| 1703593 | 56 |
| 1703599 | 75 |
| 1703614 | 52 |
| 1703635 | 67† |
| 1703641 | 20 |
| 1703644 | 26 |
| 1703689 | 58 |
| 1703695 | 47 |
| 1703713 | 37 |
| 1703722 | 46 |
| 1703743 | 99 |
| 1703836 | 46 |
| 1703848 | 40 |
| 1703851 | 41 |
| 1703902 | 40 |
| 1703908 | 39 |
| 1703968 | 48 |
| 1703974 | 53 |
| 1703986 | 49 |
| 1703998 | 36 |

TABLE 28
Reduction of MAPT RNA by RNAi compounds
that target human MAPT nucleic acid

| Compound | MAPT |
|---|---|
| Number | (% UTC) |
| 1612982 | 29 |
| 1702375 | 78 |
| 1702438 | 87 |
| 1702441 | 61 |
| 1702462 | 98 |
| 1702465 | 101 |
| 1702471 | 96 |
| 1702477 | 91 |
| 1702480 | 147 |
| 1702495 | 101 |
| 1702510 | 94 |
| 1702519 | 66 |
| 1702522 | 128 |
| 1702573 | 81 |
| 1702579 | 71 |
| 1702582 | 114 |
| 1702615 | 138 |
| 1702636 | 137 |
| 1702663 | 57 |
| 1702675 | 103 |
| 1702681 | 61 |
| 1702699 | 63 |
| 1702729 | 48† |
| 1702735 | 92† |
| 1702741 | 43† |
| 1702762 | 40 |
| 1702768 | 38 |
| 1702774 | 99 |
| 1702777 | 102 |
| 1702813 | 46 |
| 1702888 | 81 |
| 1702921 | 62 |
| 1702924 | 47 |
| 1702933 | 58 |
| 1702996 | 89 |
| 1703029 | 80 |
| 1703035 | 93 |
| 1703047 | 46 |
| 1703077 | 68 |
| 1703095 | 49 |
| 1703167 | 95 |
| 1703191 | 71 |
| 1703224 | 40 |
| 1703257 | 63 |
| 1703293 | 44 |
| 1703305 | 92 |
| 1703338 | 75 |
| 1703347 | 41 |
| 1703350 | 44 |
| 1703371 | 92 |
| 1703407 | 74 |
| 1703437 | 94 |
| 1703440 | 77 |
| 1703455 | 46 |
| 1703491 | 41 |
| 1703509 | 44 |
| 1703542 | 45 |
| 1703548 | 52 |
| 1703590 | 72 |
| 1703638 | 38 |
| 1703650 | 25 |
| 1703752 | 46 |
| 1703767 | 43 |
| 1703809 | 39 |
| 1703818 | 55 |
| 1703821 | 41 |
| 1703830 | 49 |
| 1703860 | 45 |
| 1703866 | 42 |
| 1703869 | 47 |
| 1703887 | 40 |
| 1703899 | 40 |
| 1703911 | 40 |
| 1703929 | 41 |
| 1703932 | 41 |
| 1703935 | 33 |
| 1703941 | 36 |
| 1703956 | 40 |
| 1704001 | 43 |

TABLE 29
Reduction of MAPT RNA by RNAi compounds
that target human MAPT nucleic acid

| Compound | MAPT |
|---|---|
| Number | (% UTC) |
| 1612982 | 25 |
| 1702360 | 77 |
| 1702363 | 35 |
| 1702381 | 30 |
| 1702408 | 59 |
| 1702543 | 69 |
| 1702549 | 61 |
| 1702570 | 54 |
| 1702591 | 77 |
| 1702606 | 85 |
| 1702609 | 82 |
| 1702624 | 22 |
| 1702627 | 31 |
| 1702645 | 54 |
| 1702657 | 91 |
| 1702693 | 68 |
| 1702702 | 27 |
| 1702714 | 45 |
| 1702720 | 20 |
| 1702771 | 86 |
| 1702825 | 44 |
| 1702828 | 70 |
| 1702837 | 59 |
| 1702849 | 55 |
| 1702852 | 76 |
| 1702855 | 74 |
| 1702906 | 59 |
| 1702915 | 58 |
| 1702936 | 80 |
| 1702942 | 69 |
| 1702984 | 71 |
| 1703008 | 98 |
| 1703020 | 67 |
| 1703026 | 100 |
| 1703041 | 74 |
| 1703065 | 82 |
| 1703068 | 59 |
| 1703134 | 55 |
| 1703170 | 79 |
| 1703200 | 58 |
| 1703212 | 67 |
| 1703242 | 92 |
| 1703245 | 97 |
| 1703263 | 65 |
| 1703302 | 78 |
| 1703326 | 54 |
| 1703344 | 66 |
| 1703359 | 50 |
| 1703368 | 90 |
| 1703377 | 60 |
| 1703410 | 72 |
| 1703446 | 99 |
| 1703452 | 54 |
| 1703464 | 67 |
| 1703488 | 52 |
| 1703497 | 46 |
| 1703506 | 47 |
| 1703551 | 97 |
| 1703563 | 107 |
| 1703566 | 95 |
| 1703620 | 53 |
| 1703623 | 36 |
| 1703626 | 53 |
| 1703659 | 49 |
| 1703677 | 82 |
| 1703698 | 47 |
| 1703785 | 49 |
| 1703806 | 56 |
| 1703815 | 70 |
| 1703833 | 60 |
| 1703884 | 49 |
| 1703893 | 52 |
| 1703920 | 64 |
| 1703938 | 49 |
| 1703953 | 45 |
| 1703971 | 45 |
| 1703977 | 51 |
| 1703980 | 46 |
| 1703989 | 47 |

The application's sequence listing, which the Patent Office published only in electronic form, follows.

SEQUENCE LISTING (1842 sequences)

SEQ ID NO: 1 - RNA, 6815 nt, Homo sapiens
  source 1..6815: mol_type = mRNA
gcagtcaccgccacccaccagctccggcaccaacagcagcgccgctgccaccgcccaccttctgccgccgccaccacagccaccttctcctcctccgctgtcctctcccgtcctcgcctctgtcgactatcaggtgaactttgaaccaggatggctgagccccgccaggagttcgaagtgatggaagatcacgctgggacgtacgggttgggggacaggaaagatcaggggggctacaccatgcaccaagaccaagagggtgacacggacgctggcctgaaagaatctcccctgcagacccccactgaggacggatctgaggaaccgggctctgaaacctctgatgctaagagcactccaacagcggaagctgaagaagcaggcattggagacacccccagcctggaagacgaagctgctggtcacgtgacccaagaggagttgagagttccgggccggcagaggaaggcgcctgaaaggcccctggccaatgagattagcgcccacgtccagcctggaccctgcggagaggcctctggggtctctgggccgtgcctcggggagaaagagccagaagctcccgtcccgctgaccgcgagccttcctcagcaccgtcccgtttgcccagcgcctcctccaacaggaggccctcaggagccctccctggagtggggacaaaaaggcggggactgggccgagaagggtccggcctttccgaagcccgccaccactgcgtatctccacacagagcctgaaagtggtaaggtggtccaggaaggcttcctccgagagccaggccccccaggtctgagccaccagctcatgtccggcatgcctggggctcccctcctgcctgagggccccagagaggccacacgccaaccttcggggacaggacctgaggacacagagggcggccgccacgcccctgagctgctcaagcaccagcttctaggagacctgcaccaggaggggccgccgctgaagggggcagggggcaaagagaggccggggagcaaggaggaggtggatgaagaccgcgacgtcgatgagtcctccccccaagactcccctccctccaaggcctccccagcccaagatgggcggcctccccagacagccgccagagaagccaccagcatcccaggcttcccagcggagggtgccatccccctccctgtggatttcctctccaaagtttccacagagatcccagcctcagagcccgacgggcccagtgtagggcgggccaaagggcaggatgcccccctggagttcacgtttcacgtggaaatcacacccaacgtgcagaaggagcaggcgcactcggaggagcatttgggaagggctgcatttccaggggcccctggagaggggccagaggcccggggcccctctttgggagaggacacaaaagaggctgaccttccagagccctctgaaaagcagcctgctgctgctccgcgggggaagcccgtcagccgggtccctcaactcaaagctcgcatggtcagtaaaagcaaagacgggactggaagcgatgacaaaaaagccaagacatccacacgttcctctgctaaaaccttgaaaaataggccttgccttagccccaaacaccccactcctggtagctcagaccctctgatccaaccctccagccctgctgtgtgcccagagccaccttcctctcctaaatacgtctcttctgtcacttcccgaactggcagttctggagcaaaggagatgaaactcaagggggctgatggtaaaacgaagatcgccacaccgcggggagcagcccctccaggccagaagggccaggccaacgccaccaggattccagcaaaaaccccgcccgctccaaagacaccacccagctctggtgaacctccaaaatcaggggatcgcagcggctacagcagccccggctccccaggcactcccggcagccgctcccgcaccccgtcccttccaaccccacccacccgggagcccaagaaggtggcagtggtccgtactccacccaagtcgccgtcttccgccaagagccgcctgcagacagcccccgtgcccatgccagacctgaagaatgtcaagtccaagatcggctccactgagaacctgaagcaccagccgggaggcgggaaggtgcagataattaataagaagctggatcttagcaacgtccagtccaagtgtggctcaaaggataatatcaaacacgtcccgggaggcggcagtgtgcaaatagtctacaaaccagttgacctgagcaaggtgacctccaagtgtggctcattaggcaacatccatcataaaccaggaggtggccaggtggaagtaaaatctgagaagcttgacttcaaggacagagtccagtcgaagattgggtccctggacaatatcacccacgtccctggcggaggaaataaaaagattgaaacccacaagctgaccttccgcgagaacgccaaagccaagacagaccacggggcggagatcgtgtacaagtcgccagtggtgtctggggacacgtctccacggcatctcagcaatgtctcctccaccggcagcatcgacatggtagactcgccccagctcgccacgctagctgacgaggtgtctgcctccctggccaagcagggtttgtgatcaggcccctggggcggtcaataattgtggagaggagagaatgagagagtgtggaaaaaaaaagaataatgacccggcccccgccctctgcccccagctgctcctcgcagttcggttaattggttaatcacttaacctgcttttgtcactcggctttggctcgggacttcaaaatcagtgatgggagtaagagcaaatttcatctttccaaattgatgggtgggctagtaataaaatatttaaaaaaaaacattcaaaaacatggccacatccaacatttcctcaggcaattccttttgattcttttttcttccccctccatgtagaagagggagaaggagaggctctgaaagctgcttctgggggatttcaagggactgggggtgccaaccacctctggccctgttgtgggggtgtcacagaggcagtggcagcaacaaaggatttgaaacttggtgtgttcgtggagccacaggcagacgatgtcaaccttgtgtgagtgtgacgggggttggggtggggcgggaggccacgggggaggccgaggcaggggctgggcagaggggagaggaagcacaagaagtgggagtgggagaggaagccacgtgctggagagtagacatccccctccttgccgctgggagagccaaggcctatgccacctgcagcgtctgagcggccgcctgtccttggtggccgggggtgggggcctgctgtgggtcagtgtgccaccctctgcagggcagcctgtgggagaagggacagcgggtaaaaagagaaggcaagctggcaggagggtggcacttcgtggatgacctccttagaaaagactgaccttgatgtcttgagagcgctggcctcttcctccctccctgcagggtagggggcctgagttgaggggcttccctctgctccacagaaaccctgttttattgagttctgaaggttggaactgctgccatgattttggccactttgcagacctgggactttagggctaaccagttctctttgtaaggacttgtgcctcttgggagacgtccacccgtttccaagcctgggccactggcatctctggagtgtgtgggggtctgggaggcaggtcccgagccccctgtccttcccacggccactgcagtcaccccgtctgcgccgctgtgctgttgtctgccgtgagagcccaatcactgcctatacccctcatcacacgtcacaatgtcccgaattcccagcctcaccaccccttctcagtaatgaccctggttggttgcaggaggtacctactccatactgagggtgaaattaagggaaggcaaagtccaggcacaagagtgggaccccagcctctcactctcagttccactcatccaactgggaccctcaccacgaatctcatgatctgattcggttccctgtctcctcctcccgtcacagatgtgagccagggcactgctcagctgtgaccctaggtgtttctgccttgttgacatggagagagccctttcccctgagaaggcctggccccttcctgtgctgagcccacagcagcaggctgggtgtcttggttgtcagtggtggcaccaggatggaagggcaaggcacccagggcaggcccacagtcccgctgtcccccacttgcaccctagcttgtagctgccaacctcccagacagcccagcccgctgctcagctccacatgcatagtatcagccctccacacccgacaaaggggaacacacccccttggaaatggttcttttcccccagtcccagctggaagccatgctgtctgttctgctggagcagctgaacatatacatagatgttgccctgccctccccatctgcaccctgttgagttgtagttggatttgtctgtttatgcttggattcaccagagtgactatgatagtgaaaagaaaaaaaaaaaaaaaaaaggacgcatgtatcttgaaatgcttgtaaagaggtttctaacccaccctcacgaggtgtctctcacccccacactgggactcgtgtggcctgtgtggtgccaccctgctggggcctcccaagttttgaaaggctttcctcagcacctgggacccaacagagaccagcttctagcagctaaggaggccgttcagctgtgacgaaggcctgaagcacaggattaggactgaagcgatgatgtccccttccctacttccccttggggctccctgtgtcagggcacagactaggtcttgtggctggtctggcttgcggcgcgaggatggttctctctggtcatagcccgaagtctcatggcagtcccaaaggaggcttacaactcctgcatcacaagaaaaaggaagccactgccagctggggggatctgcagctcccagaagctccgtgagcctcagccacccctcagactgggttcctctccaagctcgccctctggaggggcagcgcagcctcccaccaagggccctgcgaccacagcagggattgggatgaattgcctgtcctggatctgctctagaggcccaagctgcctgcctgaggaaggatgacttgacaagtcaggagacactgttcccaaagccttgaccagagcacctcagcccgctgaccttgcacaaactccatctgctgccatgagaaaagggaagccgcctttgcaaaacattgctgcctaaagaaactcagcagcctcaggcccaattctgccacttctggtttgggtacagttaaaggcaaccctgagggacttggcagtagaaatccagggcctcccctggggctggcagcttcgtgtgcagctagagctttacctgaaaggaagtctctgggcccagaactctccaccaagagcctccctgccgttcgctgagtcccagcaattctcctaagttgaagggatctgagaaggagaaggaaatgtggggtagatttggtggtggttagagatatgcccccctcattactgccaacagtttcggctgcatttcttcacgcacctcggttcctcttcctgaagttcttgtgccctgctcttcagcaccatgggccttcttatacggaaggctctgggatctcccccttgtggggcaggctcttggggccagcctaagatcatggtttagggtgatcagtgctggcagataaattgaaaaggcacgctggcttgtgatcttaaatgaggacaatccccccagggctgggcactcctcccctcccctcacttctcccacctgcagagccagtgtccttgggtgggctagataggatatactgtatgccggctccttcaagctgctgactcactttatcaatagttccatttaaattgacttcagtggtgagactgtatcctgtttgctattgcttgttgtgctatggggggaggggggaggaatgtgtaagatagttaacatgggcaaagggagatcttggggtgcagcacttaaactgcctcgtaacccttttcatgatttcaaccacatttgctagagggagggagcagccacggagttagaggcccttggggtttctcttttccactgacaggctttcccaggcagctggctagttcattccctccccagccaggtgcaggcgtaggaatatggacatctggttgctttggcctgctgccctctttcaggggtcctaagcccacaatcatgcctccctaagaccttggcatccttccctctaagccgttggcacctctgtgccacctctcacactggctccagacacacagcctgtgcttttggagctgagatcactcgcttcaccctcctcatctttgttctccaagtaaagccacgaggtcggggcgagggcagaggtgatcacctgcgtgtcccatctacagacctgcagcttcataaaacttctgatttctcttcagctttgaaaagggttaccctgggcactggcctagagcctcacctcctaatagacttagccccatgagtttgccatgttgagcaggactatttctggcacttgcaagtcccatgatttcttcggtaattctgagggtggggggagggacatgaaatcatcttagcttagctttctgtctgtgaatgtctatatagtgtattgtgtgttttaacaaatgatttacactgactgttgctgtaaaagtgaatttggaaataaagttattactctgattaaa

SEQ ID NO: 2 - DNA, 137001 bp, Homo sapiens
  source 1..137001: mol_type = genomic DNA
caaaaattagccgggagtggtggcatatgcctgtaatcccagtagctgggaggctgagacaggaaaatcgcttgaacccgggaaacaggttgcagtgagccgagatcgtgccactgcactccagcctgggcaacagagcgagactccatctcaaaaaaacaaaacaaacacacacaaaaaaccaaaaataaataaataaaatgatcacttctgaatactgatctaactaggggttgcagggtgggctgatatagggagaaactggagagcaaggagatcactaaggtccctacatgtccagaaccaagatagaggtcttgaactaggatggtggcagttagaacaacaacaacaaaaagtcaattccaggctgagtgcagtggctcatgcttgtaatcccaacgctttgggaggctgaggtgggagttagaaagcagcctgggcaacactgcaagacctcctctctaaaaaaaaaaaaaaaaaaaagttagccaggtgtggtggtgcccacctgtagtcccagcaactcagaaggctgaggtgggaagattgcttgagccccaggagttcaagcttgccgtgagctacgattgtgccactgcactccagcctgagcaagaccttgtctccaaaaaaaggtcaattccactgacttttctaaggtgtacaccatcaaggggcagctccatctccaggccattggctcatgagacattctgtagtcagaaggctagggcagattgctttgagcaagcccccatggtggttctcactcctacttctttgggtatatgcccctctgtttaaaaataaagttaatatgcatttaaaaaaaaaaaggagaaaaaggtcagttccagaaactgtgtgaataaagcattttacttgctttttctattaatctataacatatgttgattttttaaaaagaatataagagctatgcaaattggagcttcaagacaacttcccatctccctaggaggagatggctgccctaaacccccctacatagaaatcatcccactgcttgggcttaaacttgatgttggggaaatgaaaaatccaagctaaggccgaagcctggggcctgggcgaccagcagaatgaggaccactggtcagtttcaggctgaggtgcgtcttccaggggacaatctctagctggcccttaaacattcagacttcaagctctatttacagcataaaggtgtttcaaaagacgtgatacaaataactgcaaatgctctgcgatgtgttaagcactgtttgaaattcgtctaatttaagatttttttttctgacgtaacggttagattcacgtttctttttttttaagtacagttctactgtattgtaactgagttagcttgctttaagccgatttgttaaggaaaggattcaccttggtcagtaacaaaaaaggtgggaaaaaagcaaggagaaaggaagcagcctgggggaaagagaccttagccaggggggcggtttcgggactacgaagggtcggggcggacggactcgagggccggccacgtggaaggccgctcaggacttctgtaggagaggacaccgccccaggctgactgaaagtaaagggcagcggacccagcggcggagccactggccttgccccgaccccgcatggcccgaaggaggacacccacccccacaacgacacaaagactccaactacaggaggtggagaaagcgcgtgcgccacggaacgcgcgtgcgcgctgcggtcagcgccgcggcctgaggcgtagcgggagggggaccgcgaaagggcagcgccgagaggaacgagccgggagacgccggacggccgagcggcagggcgctcgcgcgcgcccactagtggccggaggagaaggctcccgcggaggccgcgctgcccgccccctcccctggggaggctcgcgttcccgctgctcgcgcctgcgccgcccgccggcctcaggaacgcgccctcttcgccggcgcgcgccctcgcagtcaccgccacccaccagctccggcaccaacagcagcgccgctgccaccgcccaccttctgccgccgccaccacagccaccttctcctcctccgctgtcctctcccgtcctcgcctctgtcgactatcaggtaagcgccgcggctccgaaatctgcctcgccgtccgcctctgtgcacccctgcgccgccgcccctcgccctccctctccgcagactggggcttcgtgcgccgggcatcggtcggggccaccgcagggcccctccctgcctcccctgctcgggggctggggccagggcggcctggaaagggacctgagcaagggatgcacgcacgcgtgagtgcgcgcgtgtgtgtgtgctggagggtcttcaccaccagattcgcgcagaccccaggtggaggctgtgccggcagggtggggcgcggcggcggtgacttgggggagggggctgcccttcactctcgactgcagccttttgccgcaatgggcgtgtgtgtgtgtgtgtgtgtgtgtgtgtgtgtgtgtgtgtgtgtggaggggtccgataacgacccccgaaaccgaatctgaaatccgctgtccctgccgctgttcgccatcagctctaagaaagacgtggatcgggttctagaaaagatgactccctgcacgcccctccctgcacctcccgagcagtgattccgacagggccttcactgcccctgattttaggcgggggccggccccctccccttttcctccttcagaaacccgtaggggacatttgggggctgggagaaatcgaggagatggggaggggtccacgcgctgtcactttagttgcccttccccctgcgcacgcctggcacagagacgcgagcagcgccgtgcctgagaacagtgcgcggatcccactgtgcacgctcgcaaaggcagggttcacctggcctggcgatgtggacggactcggcggccgctggtccccgttcgcgggcacgcacagccgcagccacgcacggatgggcgcggggctgcaggtgcatctcggggcggatttctttctcagcgctcggagcgcagggcgcccggcgtgtgcgctccctgccggaggcgcggggctggcgcgcagggctcgcccctcactgcggcagtgggtgtggaccctggtgggcgaggaagggggaggataggctgtgcctcctcccactcccgcccccagcccccctttttttccccctcggaacgcgaggtgccatcttttttcggcgtgtcacgtctttacggtgccatgccaaaccgggtggccgggcttcataggacagggcggggcctggcattaaagggagggggacaatcagcgctgaaatcttggcgttttgctgctgcgggcgtgagcactgggggcgttcgcccagcaccttcttcgggggctctttgctttgtctgtagaggttacgtgatctgcgctcccagccctggtttctggcttttattctgagggtgttcagtcaacctcccccctacgcccatgcgcctctctttcctttttcgctcctcatttccgagcccattgttggatctcgaggcttgctgggttcgatgaactcgagtcaaccccccgacccccggcacgcatggaacgggcgtgaccgcgcgcagcctcgtctcggagtctgccggcgccgggaagcttctgaagggatgggattcgagtctccgtgcgcgctgcgggcggcggcagagggatctcgcccctccctacaccccaagtgtcctgagggccacgccacaccaggttgcccagcgagggacgctggctacccatccggggatgggtggggagccctggcggggcctctccggctttacgccctgttgcttcgcctggccggagaatgtgaggaaggggcataaggttactggtgcttcggccacacccatctttctgagcccactggactgggcgcagaggggggattgccatggaaaccacaggtgtccggagaggggatcttggggctggcctcaccccttccctgcggagattggggaccctggggtagggggagccgcgcccagtcggcctcctggaggacacgggaggaagccccgaacccccgcgcctgaggctgtttctgattggcccctggaggccgcagacacgcagataggcggccctgggtgtatttttattaatattatgtccgtactgattaatattatttatcttaaataaatttcacccgtgtccaagttcaccgcgcccccaaaaccgagtctggggcggcagggggaactcctggccaacgaatccatgcctcgccctcctgtgatgaacctggtacgcacggttttctggttaattctatcgctgaaaactggtgcggggggcgcacttctgagacggaagagcatctaggagctgaatcctccacgcgggtcgcccaggttgatctgaatttctggggaatggcttggctgcccgcccgggaccaggccgaccctccttgacggtggcgtagagggctggagcctgggtactgcgaggctcctcgcatggctgggcccgccgcgaggggttgcagagcggctcagggatcgattcaagcatcgtctctcctccctcgcccccagacagagctgggcgcggggttccccttccagatggagcgagggtctcggggtggccccggaaaaggggagcccgcggccacggctacgtattgccatctcgcgagcagagatgtcacctcctgcctttggaggaaagggagcccggtggggatgagcgcatttagcccaatgctgggaacaaagcgcactccgcgcttctgcgatttcgctccattttgaaatgtgttggcgctttggtggggccgctgcggtgggcaaggccgggggcgctgttaatggaggaacctcagggggacggtccttcgtaggaaactctatcctggctctgcgcgcgctttaaggaaatggcttccctccaggacctcgagggatgcagcttttgcgcggatgacggtggggtgctgaaccagccggtgcgcctctggaaatgtctgggcacggatcctggggccatcgacgactcctccccattcccagcaggcgggagctcttacattccgagcgagtgacccctctcaccctctggcgctcacacacctgtaactccaaacctccgtctcagaatggtccaggctggaagggatgatgggggctccgacagcgactgcctagctcacccctctgcgtgctcaggctccaggctcagcaggaccaatttgagttctatctgatccccctcggccccttaactgacccatcctacaggagacagggaaatgtctttcctaccgcggttgattctggggtgtcattttgtgttttgtgatggctgcttatatttactgtataagcattgtatttactgtataagcattgtattataattactgtataagctgcttatatttactgtataagcatctccaaatcctccctctacgtaaacaaattaatggataaacagataagtgtatcccctgcccccacccctgctacgcaggtccggagtgactcttgaagctcatacattccttggccaagtttgcttctctaacagatgtttatatagcaataacctggcttggctcttgggttcacctttggacgatttggggaaggggcttgttggctttgctgggttttggatgagtgacagtccatgactgttcctgctggaagggcgtgacttttaagtggtttctaatatcaggcattgctcctccgacaggaacaaaagaaatggatactgcccataaattgttagaaaacttagaatcgctttgattgaggaaaggttagatttattccggttggaaaaagtggcctttctattaaacgtgccctttgaccctcatgcccttggaggtcggtgccagcctggagatgggataagattgtggttttccttctgcctttttaacatctgttgttacagtccatttgttgaaaatttaaagaaactgttttattccactttccctcagcatttatgtgtgtggtttcagtagctctgtggctatatgtacgaacacgtgttatttttccaattggacatgtgataattttccaactggaccttgccttctattgatgtatttatttagcatcttccttactccctccttgaaaaagaatcactcaaaaacaaataaaaacagccgtaggggcctaatacagtgctagacatacaagaggtattcggtccataccaaatggattttatccatgaaggataaatggggaaatacagtgggaagcaggtgggaaactgcgtttgactctgctctttcctccaccaccactttcctcatcaccgtgttcagagacccccaaagccccctcacactcccagaaacacccccctggccactcctaacttgccatgcccaggagttaggtgcttccactagtgacatggagctggcgtttggggggcacctcagcaggtgacgggaagagaagaccccagcctcaccagctgggctgcagcagggagaggagtcctcatgttccagcagggactctcagctgttttcctgtaaaaccatggttctcaactgggggccactgagatgtctagagagatgtttttgttttcacaactcggggagggtgctactgacatcttgtgggtagaggccaggaatgctgttaaacatcctacaaggaaggcacaggacagtctcctacatcaaaatatgacccagtcccaatgtcaccactgctggggttgacactggcactgctatcttaattacattcattgagtgtcttttaggaggccctattctaagtgcttgctaagattatctcatttaatcctcacaacacttccgctatgtagcaggtgctgttattatctccgtgatggggaaactgaagcacagagagggttagtaacttgctaaaggtcacagagccagtgggtggtggagctggttgcctgacactagttccctcccctctcagccacatgtgggtttacttggccattgtggactagtctgggaacccagatatgatctataacattgacccagtagaatattgattccaaaaccactgtctcacaaatgaatttttacaagagtctgtaatcggagcatgacccagaataaggttagggagatgtggagttaaagctctcaatttcttatctggccccgacacagagagcaaggcatttcactctacattggtgctctgtttataaaacaaagagcaaatatctcttcctaaggtccttaaacctcttcccccaatccagggtttctggactgctctgccatatgacggggcagctggtttgattgacccagggaaggctggaaatcaagactgggggatcaagacgtagattcagtgtggccaaggtcaagtctctgaggtttagggacatcagatccccagcttaggttctgtacctcggcaaggtgaaagcgttggcgcccactgatgaggcctgctctgagattgtgggtgtgggttgagttgggtgggcataggcaagtcctcttgtaagaatcttttggcaaagatgggcctgggaggcttttctcacttcctggggcccaggctttgcaataagtattccattatactgtggtaccttggggctacctgagaatcctctgtctcgcccctgttgccttgccaaagagtttgctgtccaagaattcctttcctgtctccaggtgccatgctcctgccacctctgccaggttccctgcctgcccagatggctcccaactgagtgtgaggaggaatttgagacaggttttgagctttctgggttctccagttaggaaactttctgtaagcatgcagatagaatgggcttcagcaaaatacaaactcgaacaacttccatgtatagtcccttaattttctttgcttttttcatatttcatcaggctccatgctgagcccaatcagggacccgatagaaatccaaacaccatgtcagcgagtccccaagaaatgcattttgtgccaaggctattcaaggaaggtttgggagcagctcaagggcagacactgttaccctcccccaggtccccagtgcagggcagtgttctgcatgtggaggcagtttggcctaatggttaaggaggtaggctctgatcgggcctcctgggcacaaatcccagctccctgctcactgtgagacctaagccatattgtttagctgcttggagagttttttgtcatccacaacttggagtatgatggtacctgtctcacgggttgccatggggttcacacaagctaacccggtactcactagggccaagcacatagtaactgctcagtaaatggcatcatcggcggtgtcctgtggatgagtgcttgtgattggctgaatgaccagaggggtctaaagatcctggtgatggaatcagttgtacagataaattgttacactgagtagggatcaagataggaaaagtcggcaactacccagctcccctgcaccaaactgggcagaagtggatcctctgaaaattgcacacacccatgtttaaatgtacacacagaactcttgccacaggcaagcggagatttgtcatctgctgtccctgcctcatcttcttcctgaaatccactccatgccaggaataaactgcatgctctccaccagcccaaactgacctgccttcccgccagccatcccgggcagggtgacctggcttagtacatcgggttcagagatctttccagtttactcgttgaataaaaagtgagggctgatcgagaaagtaatggcagtcagggaaggcgaaggaggtaaagaagagattttacaaatgaagtaattcaacagagtgctgacattggtaaactggcaaacagatttcagggtggttggttgagagtagagtagaaaaggattaaataaagcaaacttgtggtgtactgaatcttaggaattccatgtatccaataagtatagtcatttatgaattaataaattcggcctaagaagccttcttatcgcttaaatcaagactaagtaacaatatatcagttttaaaaagtcattatatcagaaaatcatttaaatgatacacatagatttccaagattttactttaaccgaaactatataaatgtgaatttgttcacccatcttttgacacagggctcaggtcttctcttggtgtctggatcagccagttgaaatttcttgtctgttttgcctatgccacattaataatgcactgtctgggtcctccgatttcagtttggattttgggtttacattgtggagtcatctgaatgcagaatccttcagggattttacttttttttttttttttcatggtctttaccatcccatttgatagtaaatattactcacctttatgaagtctttccaaaacattcaactaaattttcttaaaatcattgaatgatttgaagagcttattcctcagcacttttactccatcagcttgcaccttattttttaatctttttttgagacggagtctcgctctatcgcccaggcttaagtgcaatggcgcgatcttggctcactgcgacctccacctcctgggttcaagcaattccgcctcagcctccgccgtagccgggactacaggtacacaccataatgctcggctgatttttgtatttttgtagggatggggtatcgccatgttggccaggctggtcccgaacttctgacccaagtgatccacccacctcggcctcccaaagtgctgggattacaggtgtgagccaccgcgcccggccagcttgcaccttatttaggatatgtgattattatagcaagtctggtgtacatacaagattttgaatgggcacagatgacctttagtaagtgcttggctgtgataagaggcagtcctgactgcagatcaggctgtgtggaccccagccttgcatgtttacagaccttcatgtcttattcttacagggtatcagaagaacacctactggggaaacttataaattagtaaaaggtgggcattctccccgcccatcttctgtctgtctgccaggactagcacagcactttgaagtcattcacatagaatcccaacttaagagggtaaaatcctcctcaacagactgaaaataagtttaaattccctttgctatattaactcccctgaggaaagagtcttagatcaatgtccaacactaaaaacagttttaaatcagcaagtgagaattaaatctgaagcaattgataataatgtttcattcattcctctcctttggccccgtccaccctactgctaaatccaggcatcaaagagaagagggacataattatctctagtcccagctgctggttttccttccagcctatggcccagttttctgttttactgagaaggctggtgatgttatcttgggatctaagtctgcagtttcaccacaaaaagtccagggatgcactttcatgcttgtgtcctcctccctgggatagcaaggatattagaagacccctggctctgtaattgcttgtcatgtgctctacagacgccacagaatgccaagaacgaagtgctgggaaggacaaattcatggaaccgtgggacggtgctcctcccccagcgtaaaggacagctcctcctcctgaattggagccagcgttctaaatcatgtgtcaacagagttgtcctggatcggatccagttctgccattgatttgcaggtcatttcagtggtacctgtttccagttgttcttaattgaacagtggcaccaaactattgtcttgcctcatccccctcccatggcctgtcccccaaaaagagacttcttgggtaattaatcagggcaacatcaggcagtctgggcgcggtggctcacgcctgtaatcccagcactttgggaggccgaggcgggcagatcatgaggttaggagattgagaccatcctggctttgtgaaaccccgtctctactaaaaatacaaaaaattagccgggcgtggtggcgggcgcctgtagtcccagctactcgagaggctgaggcaggggaatggcgtgaacccgggaggtggaggttgcagtgagccgagatcgcaccactgcactctagcctgggcgacagagctagacttcttctcaaaaaaaaaaaaaaaaaggaatctctttggttttatatatttttttttatatatataatatatattaaaatataatatatatatttatataatataatatataaatatattatatattatatatttttatatattatatattatatatattatatattatatatttatatatttatatattatatatatttatatattatatatttatatatattatatatttatatataatatatattatatattatatattatatattatatattatatatttatatatattatatattatatatattatatattatatatttatatattatatatttatatatattatatattatatattatatatttatatattatatatttatatattatatatatttatatatattatatattatatattatatatgtatatattatatatgttatatattatatatatttatatatataatatattgtatatattatatatctaatatattatatatattatatatattatatattataatatatattatatattatatatatttttatatatataatatgtataatatataatatatataaaaacatatataatatatattatatattatatatatattatatatattatatatattaaatatattttatatatattatatatattatatatattaaatatattttatatatattatatatatatacacatatatatatataaatgaggccaggctcggtggctcacacttgtaatcccagcactgtgggaggatcacttgaagccaggagtctgagactagcctgggcaacaaaacaagatcctgtctctacaaaaggaaactgtaaaaattagctgggcatgatggcatgtgtctgtagccctagctacttgggaggccgaagcaggaggatcgcttgagcccaggagttcaaggctacagtgagctatgattgtcccatagcactccagcctgggtaacacagcaaggccctgtctctaaactttttttttttaattctatttatatttacatgtatttaaatgtgaatattcactacctatttgttgcatgcctgcattttttatactgggcttgccaaaaacccgaacagctttctactttgacaatgtatcagaatttaaatcagcaatatgttaataagccaagcaaaggttatatatgcaaataaaactgttgtctataacctcctgttacactggggcacagcaaaagtcatggtgtagtcgcatgtgaacctgtccctttcatagctgctcattgccaggaaacatcaggaatagccatttggaagagtcatcagccctcccaccatccgttttctgtcttgtcttttccctatgagcaggggaaattccacgctggccccaatccccagtgcagcggctcagcctctgcctctgctgctggtccccatgaggccagcttagaaacggaggattttgcagaacatccctaaatccgcttgaataatgaagtgatcattcataaactcacctgaaccttattaaaacctatttaatatttttcctggataatcctatagggataacttgcctcctgggcttctctccaccgggttcagttcttcctttagtggtgaagttcctcccttcttagcatctcaactgtgcctgagaaaaggccagtggcggctgcactctgttccctgtggagtgttaataaagactgaataaattgaaataaatccctttcaatgtcattaagtgctataaataatcatgaaccaatgttcgatggctgatgagaaatgcaagaaaaaatttttaatcagtaggattcataagttgacaatctgggccaagttaaaaaaaataaaaataaaaagacttttaaaaagatcttatcgtttgttaccagtaagactgaattccagaagcaagctactccctcatttgtgggcccctgttatcactggctgcttagggttgccaagccctgaattcatttgtcaactaagagatttttggccaagattaagatttcccatgcctccatatttccatctgagaaatggagattatactgtcttccccctcagaatggatgataatgtggtctctcttctgttcgcatagtcatagaactgaaataaaacaacttaagagaattcctttgagcttctcagaagtgctgcagggctgggggatgcctcccaggagccgcagtcaggtgctgatctgaagtctttggtgggctgactttagcctgacctgaaatagtatagctgctgccacctggctcccttagcgtcagtcagacggtgcagctggttcctaggggtgagggctgagccagcagggtccgtgcccaggagggatgcatgggtggccacagcccagcctgcactgatcttgtctgtccccttctttggaaggaaggagccccaaaccagggtgcaagacagtgggtgggggtgccttgagcatgacctcaagtgatttccagcccctgccagtgctgacttctctggggaagggctgggacttccttctgggctcaagtcacgacccttggatggaatttcctgggagcttttctgttttttctggagttttcagttttttcctaaccagacagggacttggtacagaatctcatattctaattatgcctaggagcagcctctccccaccactcacagtgtttagcatgtgacaggaatcgattaaggcatgagtgattaaattaaagccaggcattgacttggatggtgtaatattctgacatctgtttggtgtcaaaggcacggggcaggcgcgttaattgaactgcttgcacctggcatttgaattgagccagagcggggctaaagtcagtttgccttcaccctgtaaatggagggtttctccggagcgtggatggtgggaggtatttcagggtgtatgcataacccccaccctgacaatggcccatctcttctccagcgtggccaggtttgagtgccagtcctgggtgtccagtggccccatagccttgcgttttagtaaaatgctgcccccattaccacctggtctgtgcacttcggtcactggaatttgccatcttccagtcccgaatgtggcaagccatggagccttaagctcttctccctccacatcctggaacagacccgccagtttcttccaggcattgcctcagtttgcccctctgtttccagtcacactctcaccagcgataaaatgattttagaccttatcatctcaccctcggatccttatggaaacaataatgagttgttccctgtttcaattccaaaattcatatccaatccgttttgcatgccattgccaaattcctcccagagcaaccccgtcacctgccctggccctctccaagtgtggtcctgccatgggcatcgcctgctaagccaagctggcctcgagctgcctgcccgggtccccacaccttggctcacctccctgcccagtcccgcctcctgccagcctgccctgtggctccttcatagatgccgtgctctttctgccccttgctcacccatggcagccttgcccctctctccctgccccaccccctatttaaattgacctgaccttcctcagtgtccatcttccccgaagctttccccagccttggcactcaaggtccagaggctacgcgtttcctctcacctgtggcagcgccgtgctccccagtgcctcacagtttccttcttgcccccgcttcctgtgtaggactcatctgcccacaggttgcacgtcctgtgagggcaaggactgtgtcttatgtgactttccttctccagtcacagagctgggcacatagatagctcaaaaccctctttattaacacagttggatgttgagaaatcaaacaggccaatgtcaaatgagctctccttatttaaatcaagtcagttctccacctcctagcactcagttccagtactctatatacatggaaataataaaaaacacatttcctttgaaacattctataatcgttcctttgccctacttcagaccaacttaacgcactccccattggtccaaatgagttttgctatacgaagatgctgataataatagcagcagtggattattctgctaaaaccattgcctcgttaatcctcagtcccgaggtggggattattatcctcattttgcagagaagcaaactgagactcagagatttcacagctggggagggagccagctcatccctctgtccaggcccaagctctctcccgcttgccttcctgcctctgcaacctcagagcatcccccatctggttctactgcctgtgctagtcgtgcaggagccaaaagacacgtctttagtgctaaggactggagaagccatgccctccagcctctgtgaatgggtcatatgtaacatgagcctggagaaattatttgaaaccaaaggcaagcctctaaaccaggctgctgcttcatggcgccggtgacggcagaaccaaatttagtgctgtgggcaggtccacacttatcaaatagagaagctcatttttcttccggctcacatcaagcatgaaaaatgttcacacataccccccacacacacatgctttccggaggggtccatgtggctagaggctggaagatgtggatgagaggagcctggcaggtaagcccagggaagatgacattcagcttcccagacagcatctacagggagaaatttaattaaaagtggggcggtttccctgagcaaggcagacaaagtcagccctctactgttaagaaaaagggtcacagtgagaggggaggtgaggagactgagtctgtattttctagtctgttgggctacactacctgatcccccttcctcaaaaatccactttactttccccatgtctacaccaatgtggttcacactctgggaccaggaaaagggggagtgatggggaacagagaagggaggagctcacacagctgaggctggggttatgcatatcgaattacttagaatttgcaacctcacagggtactttcatggcgttgaaatacacttcccacagccaccctccctctaactaaaagcaagagtcatttctcagttctggtcttgcctcccacgttctcctccacatttaagaaaatccaccagctacaaagtgaagataccatatgtgatatcccaccctagtttctgttttatcagggtttggagcaggtggagcaggcagagggatcatttcagcctataaattgtattaagggtgagtactgagtcattcttcaagaaaagttttagaagcatccaaaactgaagggtggagccacctggagacagtatcatcagtcctggccccgagcatggcctgcataggcccccatggatcccagcgggagctgcagagtgcgggcaccttggcacacagccctgagtgcaaaattaggagctgggcagagggcatctctctgtcgccattgggcagcccagggcacactggtcatagccttagaccacgaacaccctgtgcccgggggacagatgcaaccagtgtgccctgggctgcccaatggcaacagagagatcgacacctggaccccatgtcacggggactccactactaaggctcctaagactgccaccttccagtgggataagccctgcctcctactgggcccacaatgtgcagagaacacttgggactacctggctttctggatacacaaatattgatccaatctggactaattagaaggtcagtcccaataacaaatcgaagtcagctgggcgtgatggctcactcctataatcccagcactttgggaggctgaggtgggcagatcatttgaagccagaagttcaagaccagcctgggcaacatagcaaaaccctgtctctactaaaaatacaaataattaggctgggtgtggtggctcatgcctgtaatcccaacagtttgggaggctgaggcaggtggtcacctgaggtcaggagtttgagaccagcctggccaacagggtgaaaccccgtgtctactaaaaacataaaaattagccaagcatgatggcatgtgcctataatcctggctactagggaggctgagacaggagagaatcgcttgaatccaggaggtggttgcagtgagctgagatggtgccactgcactccagcctggttgacagagcaagactctgtctcaaaaaaaaaaaaaaaaaaaaaaaaagccatgcctggtggagcactacgtgtaatctcagctatttgggaggctgaggcacgagaatcacttgaacctgggaggcagtggttgcagtgagctgagatcgcgccactgcactccagcctgggcgacagagtgagtgagactccatttcaaaaaaataataaatctgagtcactttaatattgttatttggatgtcaacctctaggtgtttgagacaggagagtgatatgggggcactggaaacacacaggcacggggtgtcctcacacttgggtagcccacacgatgtgatttcagggtgctgggaggtccccccactccccaaattactaacaagtggatagtactttacagtttatatgatctcatttgattcttaacatgagcctgtgagtgaaaaattccttcccctcttctacagattaggacgttgagattcagggaggttcagagggattcagggaagtcaagtggcacctggagtcccgtggctaatttgaggccggtaggggattcgaacccaggatttgtgcttcttatgcctgggcttctgctccctggggcatggtcttccccctagctttcccattcactgctttagcctaggggtcctaccctttattaaactgccagtgcctcactgcttttctcccccaaagacaaaaaaaaagtgtttttgcttttgttttgtttttcatgggcagagacctggaatttcagcttgagaatttgtgccatatgataaataaatcaacagatggctttttccttaaaaaaaaaaaaaaaaaaaactaagatgtatttgcagtgaggcataatttgtaccaaaaagtgctcaccacactgtagtcatgggggcaggaggcagccgcgggtgaagggagaaatcttggagtccaggcagcccccttctgggctgaactggggagctgggggtgctgccagccctgccaggttctcctaggaggcggcagctcatatggctgtgggaggaggcagagggagcctcatatgcacccacatttccagggatctagaagacagaaggaggaaaaccaccatcatgttaaagcagacagttaggtaacacatcctgtaatacaagttattttttccacatctaaaggctaaaaatagttgttagaatttaaagataattggtaaatgagtttctatccttctagtttcacatcaaatggaatcatgctgccttcacatcactagtgcccgttatttgtgtttaatttccacaatgttgtctaattccactctttgggcttccccagggatccagcctccctcactcgcccatcgcagggagatgctttattcatctttgtgtcttctgtgccgggcatagcgcatggcacagaataagcactcagtaattgattcacgagtgaataaatggatgagtgggtgagttcaatattgactacaaaaaccctaaggccacactggtgagtggctgcgcctgtagtcccagctgctggggaatctgaggcaggaggatctcttgagcccaggagtttgaaactagcctgggcgatatagcgagaacctgtctcaaatgacaaaaacagggccaggtgcagtggctcacgcctggaatcccagcactttaggaggccaagatgggaggatcacttgaggccaggagtccgagaccagcctgggcaacatagggagaccctgtctctacaaaaaattttttaaaaattagctgggcatggcggtgtgcgcttgtagtcccagctactcaggaggctgaggcaggaggatcacttgagcccaggaaattgaggctgcagcgagccatgatggcaccactgcactgcagcctgggcgtcagaacgagacctgctctcaaaaaaacaaacaaacaacaaaaaaaaaggctttcttaaagagacttgagaacagaaaggggaacagatacataacttatatatttatttgttcatctttccaccttcctggagggtggaggggaacaggtctgtatttggagttttgaatgctaaaagtgggaatacatgtactgtttgccatgatctgttcaaaagttaagccaaatgccttagattctcctgaaaactggaatgccactgtaaactataagccccacttcaaagataaaagatcttgatgaacagggctgggtctgtggactgggcctctccccaccacacaaggaagggtggtgccagttgaaggaaaatcacttaaatccttgctgtctcctaataaggtgtggtcccaggtagggctgtcagaattagcaaattaaaacacagggcatctgtgaaaattagaatttcagataacaacaaataattggcataggctgcataatgtccctcaaagatatcaggtcctaatctccagaacctgtaaatgtgatcttatttggaaaaggggtctttgtagatgtggttaaattaaggattttgagatggggggattatcctgtattatctaggtaggtcctaaatgcagtcacactcatccttgtaagaggaaggaagagagagatggaaaacacagaagagaagacaatgtggtgatggaggcagagattggagtgaggtggccacaagccaaggactgctggcagctaccagcagccagaaaagtccaggaaccaattctctcttggagctccagagggagtgtggccctgctgacaccttagcttcaacctagtgatcctgattttggactttggccttcagaagtgtgagggaatgaatatctgttgttttaagccaccaagtttatggtcatttcctacagcagccacaggaatcaaaaacagtaagtatgtcccatgcaatgtttgtgacacacaccaaaaatattacttgttgttcacctgaaattcaaatttaactgggtctcctgtattttatttggccaacctagttcccaggcccaaagaaagaggcttttgaaatttgcaagaaagctggttggagctgtcagaaagtggactttgtaaacacagtaccaccgaaccaatttgaactgtactacctctagacaaaagagagggcagtcagacagttgttcgtgatttcttctttcaacagtcatttgagcacttactacaaaacagaagctatgtgtaagggtggaggcgttagctgttaatcaggacctccaggctaagtttctgtattagtccgttttcacgctgctgataaagacatacccgagactggggaatttacaaaagaaagaggtttaattggacttacagttccaagtggctggggaagcctcacaatcatggcagaaggcaaggaggagcaagccacatcttacatggatggcagcagacagacagggagagagagcttgtgcaggggaactcctctttttaaaaccatcagatctcgttagacttattcactatcaagagaacagcacagaaaagacctgcccccatgattcagttacttcccaccagatccctcccacaacatgtgggaattcaagatgagatttgttaccatatcagttaccaacccttccagataaatcacgtgaaatatcgccattaacagagtgagctcaggtggttcttcagtgcatttctgatacctgaaccttccctgggaatttcacagaccatcaggctctccaccctttgatagcaggatagcagggcccaggttctgcaggaggagatgttaccacaggcctgaaagggagggaggggcagatgctacaggaagatgctggctctggattcgctggaggagctttcaagggaagtagatacacactgtctccatcatttcatgtccatcacactctaaaatgctttggacaagaagcaaatgttaaagacaaatgtggcccattttcctgtacaaagagggctgctcccatgccaggctattggcactggtgggcatgaggcttctctgctgccctggccggggggttctctcactcaccattggctctctgacacctggagagaccaccacccttgggctttcatgatgctcacagaatccacactgttggagctttaaggagcctggatcaactggaacaggcagggagtactaggacagcccagcattgccccaaaatatccaggcctgataaaagagaaaaacaggtagctcacaggaaaaggataaaaaaaggaggagggatttaacatgaaaaggtgcttgatctccctcataataaaaagactgctgattccatccaggcaagtgacagaaaaaaaaaatttaatttaaaaagactgctgataaaaccacagcgagacactgctgctcagggatctgagggtgtgggcagccaggctgccacgcatcatgggtcggagaggaagaccacacccctggagcagagggcggctgatctgtcagatgccctttgacagcacctcagcttccaagaattaaccctttctatgtgagcagaggcatccatggggggacacactggtgaatcatctgttatgtagaagtctggaaaacatcaggatggaactggtgaaataagtgtggcctctgacggaatggagcggtccgtctgcactgctgcgggtgcccctcagatcctgtgggtcagtgagaaaagcagtgaggaacaaggcaggtactgtgtactgtcctctgcgtgcaaggaaggccagcgcatgcaacagagtccacacagacatagcctaactctggaaggaagaatgagaatgcagtttcagtggtggcctctggtggggagaaactgggtgaagggagatgtcatttccatttctctactattaattttgtattaccatgcttaaatgttactttttacctttttttttttttttgagacagggtctctctctgttgcccaggcaggagtgcagtggtacaatcatggttcactgcagcctgaacctcccaggctcaagcaatcctcccacctcagcctcctgagtagctgggactataggcacgcataccaccgtgcccagctattttttttaatcaagatggagtttttctatgttgcccaggctggtctcaagctcctggactcaagcaatcctcctgcctcagcctcccaaagggctgagattaaaacgtgagtcaccctgcccagccaattgctttttaaaaaagattaaatgcatgtatacgctcaggcatcagcacacttggaaaggatgaaaatatccggaagaagggttcttttaaaaggctcctcaagtgatgctggcaggcatgacgaatgtccctggtcacaaaagctctgatctggcctaaccctgtcatgttagagactggagtgcgtgtgtgtgcgcgcaaagtgtggggggatgggggtgagtgtgtgtggtgtgtaagcatgagtgtgtatgtgtgtggtgtgggggtgtgtgctgtgtgagcgtgtgtgagtctgtgtgtgtagtgtgtgtgtgaagtatgtggtgtgtatgtgtgacgtgaggtgtgtgtggtgtgtgagttgtgtatggtgtgtgcatgagcatgtgtgtgggcatgtgatgtgtgtgtggtgtgtaagcatgtgtgagtgtgtatgtttgagcatgtgtggtgtgttgtgatatgtgtgtggtgtgtgagcatgtgtgtgtgatgtgtctgtgtgtggtgtgtgtgagcatgtgtgttgtgtgtgtggtgcatgtgtgtggcgtgtgagcgtgtgtgtgcattgtgtctgtgagcatgtgtgagtgtgtgtgtgttcagcatatataaggcatgtaactgaacacagcactttagagggctctcctggagtcagagggggtgggtaggaggagaagggaggtgggctagtgtgctgaagtatctactccttgtcatagtctgtgacaacccagactagcccatgagccaccctgttccctgcatttccaatgagacctcggtggacatgttccctgaggtgaggctgactgatgtcatttgacgatcttgatgccaaatccttttatatcaaaaacaaccagaacactctcttttctcttagtgctttcacccagatgaccacatttcatcctcccagccactctgggccaggtggcactgctggtttgaaagggaggtctcccctggagtaacttccgtgggcggattcacaccctgcccacagtcctgtcccagtcagcccaccatggtggtctccggttcctccagaattcccgcttttcagctcatccccacattcccggagggactgagagcgcagccccagggccctgctctttgggggccgtctctacacccagagaagcagcaaggcattcctaggtttctctttcagatgcagaacttcagtgttcagagatgttcccactggtcctgagagggctcagttcagctttaatgactgcgctgttgcgtgtgctctgcagagggcgggtggcccagcgtggctgactgcagttttcctgacgtggagcccgagcctgccccgctgtttattaattaaggatcactctgcttgcagaaccctgaactccccagaactgtgaggtgggagaaccccgagaggccacctggccccacttcccacctgctgcccaaaccccctctctgccttcctgacagtcaccccaactcccagtgatccccatcaaccatctgacaaggggactgagagggaagagaaaggaggggcccaaagaggaaggtaaaactgtcgggaacagcccccaaatgtgtgacagccttcagtggagttgcccactttcccttttctcctccctgcaggacctcccttctccccagtcctccccaacttctgaggttacattgagaaaagtctgcagagaggtgccagcatcacaaggtgttaaggaccacgagtttggcattttaacagatgccagagccacttgagaaatgtggtaactaagcccagagaggtacagttaacctccccagagtcacacagcaggttcatggcaaagctggactagcacaggtgtccttcccctgcagatccccttctgtgccccacatcacctccctccagtgtctgggccacctggagatgggccctcagactcacccggccagaggtgccatctcatgggagaggtctggccaggaagcatcgatatttgagatcccaagaaatgaagacttggcctgtcagatgacagacttcggtcatgggaacacgtgatctgttttacacatgcgtcccctcagcagcagctttccagaacattcccactttcttctgtagtgagaagaactctttccctgcagcctcctgcccaactcctccttcagtgtctttgcttcagtgtctttgataaaccattctgctttgcagagtgcgagctctgccttgcagggttcgcatctgcctgtgctgagtaaccaacgctaaggtcgagtggtcggtcacctctcataagagctagggttgtctcatgctgatgactaggacttgccctcaaggagaaaaataaatcaaaacaaaagcaaaaacagcaaacatgcatctcttaaagaaggctctgagtccaggtaaatttccttccactgaagcagccaggctgaattcgaattatctttgcccctgcttaaaaactaatgcaaattttcctagagaatatccactaattcctggagggggcatgggcattcctgatgcccatgagaggaccatttgctcttccctcagtatgctaaataacagaagcgacatttgttgctggaaagtatcagtgaagttaataaggtttttcttgcccagggtgagggaacagttcccaatgacaaatgctgtatgggaaggggctgtagaactgccagcccctttggtccatccgtaaagtgaactctgtggatcctggaggattccagcgtctttttttttttttctttttttttaagacagagccttgctgtcacccaggctggagtgcagtggcacgatctcagttcactgcaacctccgcctcccgggttcaagcgattctcatgtctcggcctcccgagcagcaagactacaggtgcgcaccaccatgcccgactaatttttgtattattagtagagacgggggtttcactctgttggccaggctggtctcaaactcctgacctcaggtgatccacccgcctcagcctcccaaagtgctgggattacaggcatgagccaccatgcccagccagcatctttcatttttctgtctgctttggccctttcctctctcactgtcttccttttccatttccaaagtcagtccatctcactattagcacaaaaactgctagagcgcttgtcattggtcatctctccctgcacctggctggtctgttcttggccactgaagcgtttcccccagctgttgctttaatcattttattgttattatgccttacttaagaaatggatatgagatgcatttacctgtctcttcctgccactctgcagagccagtaagatgtggtggaaagggcccaggctttggaggagggctggctggggttggatcttggctgccccctactagctgtgtgaccttgggtaagtagctggacctctctgagcctggttcggaatcatagcacctctctttcagggctgctgtaaggaatagcagtggtgtgtataaagcagagcgcacagccagcaactggcccctagccacactgctgagcacctactgtgataagctgccattgtggtgtgtgaagcaaaggggaaacatgcctgctgtagtgagcttcctgtagggcaggttgtagaaccagaggtgggttccaaggttacaaagggactcttagtgtattagtctgttctcacattactataaagacctacctgagactggatcatttataaagaaaagaggtttaattggctcacattggctgggtgcggtggctcacgcctgtaatcccagcattttgggaggccaaggccggcggatcacttgaggtcaggaatttgagaccagcctggccaacatggtgaaaccctgtctcttctaaaataaaatacaaaaattagctggccatggtggtgtgcgcctggaatcccagctactcaggaggctgaggtggaagaattgcttgagcccgggaggtggaggttgcagtgagccaagatcgccccactgcactctagcctgggcagcagactgagactctgtctcaataaaaaaaaaaaaaaagaaaagaaaaagaattgcaagaaataaattattgtttatgagctatatggtctgtggtaccttgttgtgggactgggagtcttggcgtctccctgaccctgcctgttgctgcagcaccgctcagccctgcctgctccctacctgcctcccctcggcctctcctgcctccaccgggcccctggtgcctcctctagagacagtcctcctgggaccgattgtgttctcacttacacgaggcatccaggactacagataaccagaggaaggggcgccccccccgcctgccctcctccctggcatcctcacgctgcagaggtcagagcctcatcccagccccttacctgcccctactctgtggagaaccgtggtcagttcgccaggccggatccacgaacggccttgtggaagatggtgagctcacacccagagctggctccgatgaccctgtctcctttacatgtttctaccttcccctccctaccttcccccactgctgggcgcagagtggaggcagatgaggtttaaagctcagaagggcttaaacgggttggggcgcagtggctcatgcctgtaatcccggcactttgggaggccaaggcagaggatcacttgagcccaggagttcgagaccaacctgagcaacatagtgagaccgcgtctctacaaaaaataaaataaataaaattagctttgcagggtggcatgcacctgcagtccctgctactcagaaggctgaggtgggaggatcgcttgtgcccaggagtttgaggctgcagtgagctatgctggcaccacagcactccagcctgagtaacagaatgagatcctgtctcaaaacaaacaaacaaacaaacaaaagaaggcttaaagggggctccaggtgggcttggcagcacaaagctatgaagttctatcttagacacaagttctgttactgggcctttgcaggctggcctgggtacctggctgccatagacagggaaccttccagatgagctgcaggcgtggagcacaggagccagggtgctcttcctgggctctgtccacaggcagaacgtacacagtctttgtacacgtccggcggctctggtgcctatttttgtttgtgtttttcttttgtttggggggatggatttggtttcccccgagccctctgtcctcctgtcacctggctggtgctcggcaatgttgaccagctgcctggctggagttggcagtggctaaggctgtgacagctaacatgttcctgagtcctctcatttcttcaccataatgccctgttgagtttgcagatactgtctctgtttttatctcccggggaaactgaggctcagagtggctaggccaccttcccatggtccctcagctcatgagggccacacagggcattgcggtggccttctcctcagccttgaccctccggccccagcattgctgcctcaaggggtctcctctgctgagccgtgcaccttctgcctggcagctccaactctgtggctgtgttcagtggctcagcactgccccttgaccctccctggccttctgcggatgccagactggagcactctgacaaggtctggggtggttgtatgggtcctgtgacctctatacacctcccagtgcctgggaatcctgcagatacaccctccttagccgtccctaaccatagaggacatttctgaggtccccgagagagtggggcacccctgcaggatccaactgctgggcccaggaaggatagcagcagcatgaggggttccattagccacaaactcacggcatggaaccttcacccacctcgcccctcatctgctgtttagcacctggcacgccgtgtatacttactgattattacattttaatggcaaattatagtggcaaacgtatgcatctttgcacaattgttgtacagcatgatgaacaagtcattaatagtaaagaataaatgtgaaagtgagaaaaatctgactgccaaagtttttactccttccttccctccccagacttttaaatgaaagtttagggataatcccttagttgtcctgctagtaggacttgcaattaaaagaattgggccaagaacacttctacgcttctccttttaggtttgggtgtaaattcggggtatttctcactgatgaaagcctggtgcagggcagaccgtgggaagctttcatttccggaatggaccatcaacatcccttggagaagaattctcttctccagacccagacctggtgtcctggcacccattgggcaagtgggtcctagaagacaaacctggtcagagcctggaggctgcttagcattccccacgcacattagcagctcggagagctcaggaagccgcagcccctccttgcctcaccagcctggatcaggacagcatcccctggaagacacacagggcctggcctctgattacccagcctggagggaaagctcaatcgagcatcatgtcacccggtgcccccatgcagggtggcactggtgagacccccaagccaatgataccacctcacaggagtgcaggcccattgtggccagatcatcttgacttttcaagataaatcagaaatcgtatttccatgagatatccctatttgcaagtgatggtgactaaattagaagtttttgaatattgtaacatgttcgtaggctgtttgtctggtttaaactctatctggaggaattcaagctagacttcaggaataacttcttgaggcaaggattttgagaccttagggaaagaaggacgtcttgggggtattctgactgttgtcctcctggaagggaagaacagagaactagaagactgcccttagcgaagttcaaagcacctaagcccgggaccctcagcaagtgttcttgagtcacagattctccctgaggcgcctctttctggctccatagaatggctgattctgtaactcggtgagtttgctttttttttttcctccatcacccaggctggagtgcagtgaagctggagtgccgtggagcgatcactgcaacctctgtctcccaggttcaagcaattctccttcctcagcctcccaagtagctgggattacaagcatgcagcaccacacctggctaatttttgtgtttttaatagagacggcccgaagtgctaggattacaggcatgagccaccgcggccagccataactctgtgactcttgttacaaaggccttatattttgctctttgagggtggttttggtttgatgcctgttggttgccatcttttaactagggatgttttatcaaaatgcccagccaaagtgtccaaacaaattataccttaaagtttgaaaatgtctggcacttctaattcaatgcctgttgtgccaggcactgggctgctgaggaactgagtcccgtccctgcaggctagctagagaacacacacacacacacacacacacacacacacagagtggtcttacaagtcagttttatattctacctatatgcaataaaggtattattatgttgaggtgccttgatataaaaatttttcttaaaggagaggatgcctaaaacaggcattacctgaaacctcctctctccagcattggttgtcttctgtcatgactcagggttttcactgagaatgggatggaaatgtggtctaaagatagggccaatgttgggactggatcccctctgggaagtcagaccaggctagggcaggtccttgaagccatcaggaaaagcctctggagccagaaacaaaacaaaaaaaaaatggtgttaactaaactcagtctcaaatcctgaataggactcaagtcaagcaaaataattaaaggagttagcaaagggcaagtcagagagaccgagcaacaccaatgtcttccgggagccctgtggcgagtgacagagcctggactctggagtagaactcatcttgtgtcttcttctgccactcgttagctgggtgaccttgagccaagccccttaacctcttggaccctatgttcttatctctaagtaggggctggtaatatcttcccctttgaggaatgccctctaaggggtgttgtgaagattcggtaaggtggcaggggtaggactcctggccagaaacaggcacataataaatgctaagtctctccttctctccacctgctggatgctgtagatactaaggatttcgatgtgaatgagacaaaacccctgccttccaggagcctttgagaatcagagaactagacccatttccagaacaaggggatgcagggtctggataaagttttggggatcaatagagcagagggctcccagaggatcccatagggttgactcctaactcaagggcatgagacaacccccaggaagggcaccctggaaggggtccggctgtccctgatttacttgtgggcactgggggaatgcccggagccatccagccctcagggctctgtgtgattctgggttcctcccataaaagataatcagattctttcacgttaatgtctttctccacctcattgcacatcatgcagctattcattgactcagcaagtatcagctttgcatgcgaccttggcctacccactttagcttttagtaatagctcccttcttgaataatacaaccagtggggaaacagaacctaactcttacctctgggaggcttatttgctttgagaacatatgtcctgcagttttgttcatatggcagtgaagtttcgtgcacacactctagagccaggcagcctgggttcaaagcgcagctctgccaggtcctaactgcatgaatttgggcaagtcgctcaacctctccatgcctgagtttcctcatctgtaagattggagcaatggtaatacctgctttttagggttgagaagagaattaaatgaattaagatgggtaaagtgcttagagtggagctttgcaagtagtaagtgctatgtaagtgttcgatttaaaatgaaagacccttaaatacattctttgttcatttcacaagcccttcatttcacaaccttacatttcacaaccaagctctgtctcccctggaatccagccataactctgctcacaagtgtgagacaggccccagcagagctgcacgaagaggagagaaggcagccccccagactcccaaccccctgtccaagatggcaaaaccagaacacagcctctgtaccaccccagcaggtattcagaatctgcaatctccaaagcccacttcaattgtaaatgtagagccacgtgcgctttaagtcacctgtcactctggaggctcttttgctcagttcctcaccattagcagggatgacagggagtgcaggagtgcggtcgactcccagatattggagagcgctgggctagctgcccattctcccggcctccactcctctttgctgtccagccatcacttgctctttgaaggcaaacaaaacagaaaacagtgccaaaagtatgggaagaaagccagcttctcccctggggtgcctgtgatgccatgcccaccctccctgaccacgcagcccctgtggaccctcagggccccaagcccccatttccatcacatgcgtacacccatgtgtgtccatagccgcccatctcagtcaataaggctgctcctgcccacttggaatagtggtgacaaccaggagtggcttatgggaactatcccaatggcctgacagcatgtccgctgcaaaccgctgaggtaggacactgccctcatgtctagctgatcagcaagaggcgcagttgctttcttaggtaacattgctgctgtgtcctggccattgctggggggtggcacttaatctacaccagatttttccctcctgtatcttccaagctgcttggatcttggtgctgaattaggttggactttgtcttgtggggaagggaggactatagaccctcaacgtaagcaatggtcagactattctaagaaaactcgccgaattaaagcatgaggtaaatttagttctgacttctgtccaccccactgccactgtccccttttatcccatgatcccttgcttttcttttcctcctctctccctatctcttgtgtttgacgcatgataggaattcagaaatatatgtttgtggatttgtttattcacgtagcaaaccatttcttgagtgcctaccatgggccaggtagaatgggcggccccgggctgcagtggtttcttcagcccctctccagggtttacactgtgcaagacggtttgtgatgggtcctcccatcgaggaccacactcttctttctctgtgccccttggtcctcagtctctgaccccacttcaaaggcagcattcactcagggaagctcccatacaatgctagtcagagtaaaagtttggacaaattgccaggaagcagcttgtcagtatgcataaacagcctttaaaatattactactctttgacccagaatttcacttctaggaatctgtcctaaggaagtagtcacatgcaaaagatttatgtaccaagatgttcatcaaagtgttgttttataacaggaagtctcagaagctggataaatatccaacctctggaaatggttagatagaatagtatgtagccattagaaaattatgtctatggggtttaaaatgtcatgggaaaacacttctgacataaaagagcatgagaactgtatatttagcataatcttaactatgttttagaatgcacaggaaaaaaatgtacaaacatattcatagtgatgtctctggtggtaggattatgatcagtaagtacttctgtctcttcatattttcctgtatttgataatacatgcatatgttgtttttaaaataagaaaaattttaagtttaaaattggagctgaaaagtgtttttaggtcaggcgaggtggctcacacctgtaatagcaccactttgggaggctgaggcagtcagatcacttgagcccaggagttcgagaccagcctggccaacatggtgaaaccccatctctactaaaaataaaaaaattagccatgtgtggtggcacacatctgtaatcccagctacttgggaggctgaggcatgagaattgcttgaacccaggaggtggaggttgcagtgagccaagatcgtgccactgcactctagtctgggcaacagagtaagactctatgtcaaagaaaaaaaaaaaagaaaagcctttttaaacagtagcagacataactatataatccttactaagctgtcggtcaaatttttatttatatatttattttattcatttattatttttagacagggtctcactctgttgcccaggctggagtacagtggcgtgatcatggctctcttcaaacttgacctcccgggctcaagtgatcctcccatcttagcctcccaagtagatgggaccacaggtgcataccaccacacctggctaattttttttattttttatttttagagatggtgtttactatgttgcccaggctagtctcaaactcctgggctcaagctatcctcccacctcggcctcccgaagtgctggggttaccagcatgagccactgtacccagccctcaaatttttaaaaatctataagagacattattggacaattagagaaattcacatatggacttataatagtatcagagtgtgtggtgtgatggttctggagggaatggactttttctttggagacaggcttttctatgcccacccttttatcttgctaacttatcatcatccaggttccagcagaaacattacttcccccaggaaatttcttaagggtgcagtatcatgatgtctgcagcaaattctcaaatagctcaggaaaaaagtacgtgtgtggtatgagtgtgtgtatgtatgtgtgtatatatatacacatatatacacatatatatacatatatgtgtatatatatacatatatgtgtatatatatacacacacatacacatatatatacacacacacatacatacatgtatttttatataattatatatgcagagagtgcaaatgttgccaagttaaagattggtgagtctaggtgaagggaatatggtatttattgtattatttgtgcaacttttcttaagtttgaaaattttcaaaacaaaaaattggaggaagaaggcatgccagtctaccccaagccctccattggaatgctgaaaatctaaacaatgtgatttggcaatttcatttcttttctgttgtgggccagtagtccttagatgttggggaagggggtagtcgctgaggtgtggttgacttaggatggaagaagcagaagtcaagactcccagggtcaaagtggtttgctctgctgacccaagtgtgggaggcccagagtcagcgtttcaggtgtgctaattcagcatggttctattcacggccaaagtccaccctgggcacctctctggcagcaatcttgggtgactctactaaggccaggcctccatgaccctatgtctggatcccatatctccacctctcccactgtctcaggaacggtgcttagctttttcttttccctctcctgtcttctttgccagcatgtagaaagtttaaataattcccctctttacaacaaaacaaaacatacccccttcagtcaaccaccctagctctcttctccttttcccagccagatttttttaaaagcatcctaggccaggcgcggtgactcacgcctgtaattccagcactttgggaggccaaggtgggtggatcacaaggtcaggagatcgagaccatcctggctaacatggtgaaaccccatctctactaaaaatacaaaaaagtagccgggagtggtggcaggtgcctgtagtcccagctactcgggaggctgaggcaggagaatggcgtgaacctggtaggcggaggttgcagtgagccgagatggcgccactgcactccagcctgggtgacagagtgagactccgtctcaggaaaaaaaaaaaaaaaaaaaaaaaaagcatcctcagcactttggcaactccatctcctcccaacatgtccctgttactggaatccagccaggactcagccccgatctttctactctaaccagttgtctcagttaacaaggacaggtttatgctgcagtgacaaacaagatcccaaattcttgtggcttcacacatctggcaccacctcatcttccagccttaggagtcatcttttagttccttgaaaactctttacagttttctgttggggccttgtcatatactattcccctggaatgttctttcctatcccctccctttcaccttgctaacttgtgcccatccttcaggtctcagcagaaacatcacttccttggggaagttttctccaacacccacactacacaggtgtcccatctacactcctatgactttgtggtacttgtctcacttcattttccactgccttccccacaaggcacctgcacaagggcaaggaccgtaccactgtacctatgtcactcattgctgtggtcacctgcactctggctgcctaccttaactacacattagaatcacctgaggagcttttaaagccacaatgcaagactccaccctaggccaattggatccaaatccctggggtagggccagacatcagtggagttatatatacatatatatattttgtttgtttgtttgtttgttttttgagacagagttttgctctgtcacccaggctggagtgcagtggcgcgatcttggctcactgcaagctccgcctctcgggttcacaccattctcctgcctcagcctcctgagtggctggaactacaagtgctcgccaccacgcccagctaatttttttgtgtttttagtagagatggggtttcaccgtgttagccaggatggtctcgatctcctgacctcatgatctgcctgcctcatcagcctcccagagtgctgggattacaggcatgagccactgcacccggccatcagtggatatatttttaaagcactgcagagaattctgttgcatcagcttgagaaccactgatctgccttgtgcttcacatttaaaacttttttttaatgaataaataaaccccaaaaaattaatctccctaagcctccctagaagataggatggtaaggatattttcctaggtaaaaatatgttaatttcatatttcatgaaatttcatgtttcatttcaatcaagctctgtcatacaccttacatggggcaagcccagtgcctgggcagggtgtaattatactcattacacaggcaaggaaaagtcacattaggtgatggagcacaaataggcagttaatggtttcagggctagttaggatatgtttgtctttcaattgcaagtaatagaagcccaaagaaattggttatttatataatataattgattggttcccaaatttgaaaaattcaggaatagacccagcttaggtacagctggatccagtcactcaaacaatgtcacaaagaaccctttgacaggaatgtatcctgtgttgactctactttgctctgagtagtctttccccaggtgatgataaaaatggtcatcatcgccaggcttgtgtcctgtttagtaggaatatacaagaagagctcagtaaatgctggccccaccactaagcaaaaacaaaacttttgttgttgttattgttgttttaaataacagcttagacctttcttctttccttgttattctctttcatctgtaatccagttttctacttctgaagtatagaatgttctgatgatttattcttcattacccacaacttgcacatgtttatttaaaaatgccaggattgcctggccgttgtgtgctgttaacctttgtttgctgttagtggatccctgaagttcaggctcccaggggagcagataatgggtatccagttcctgcaatatccaccctctggcaagccaagttccttcctgggtaaggttttgcctacctgcattcctagggaagtttctgggcctgaccaccaagccagctctgagaaggggtgcataagccccaccatgctttggctctgtccctatagaatattttatgttgttactgaaaactaaaggaagatgggtgcggtggctcatgcctgtaatcccagcactttgggaggccaagacagattgatcactcgatgccaggagttcaagaccagcctggccaacatggtgaaaccttgtctctacaaaaacaaaacaaaacaaaaattagccgggtatggtggcatgcacctgtggtaccagctactcaagaggctgaggcacaagaatctcttgaacctgggaggtagaggttgcagtgagccgagatcgcactactgcattccagcctgggtgacagagcaagattctgtctccaaaaaaaaaaaaaaaaagaaaaggaaagctaaaggagagagactaaaatgatatcaggttcctggagaacaaacagacatgattttgcttcatggcaggacagccggaagaagtgggattatatcctcacattacaaataagaaaactgagactcagaatggttaagtcacttgtcccaggccacacagccagtaaattacagaaacagaatttgaacccaaatcttccagctccaaagcttgtgttcttttcactacctcctgcttaattttttaatttctaagattagacccttcatctatccatgacacctgcctgtcatcccctgaaaaaaggtgaacgccgttcagaaatttttctagcctgagctcactcccagttcacttatttttgctttgtcatggctgcccagtccccacttgtagaccaggaataggtcatggctgcggggactacacgctgtcgctgctgcaagggccggcctctgtttccggggctgagtgggggccagacctgccaggagcaccatcttctgtgggtcctgcctggatgtcacatcccggccccaagaagtcactgcaaaccttcgtattattgagcttcacatcctagaatttgctgtcactgtggctgctgcatgaagttgtcctgagagaaacgggcattgtcattaacagggaaattgatggtctgggggaaaagtcatcctcattctcttgcagatctatgggtgattgagactggctgatgttgaaggggtttctcagccatcgtgtgccatgttatggaacagtggtgtagccagccatttgacacccagcgctgacctttgtttaacaacctcacctatatatgacaaaatgattgtcagaaataatcgtgtaatgaaatgactgtaataatggccagaaaagaaacgcagatagtaaaatgtttctcttgttgaactctgtacatataattgcaccaggatttttttcaaataaaaagtaaatattatactacaaaaaagggaaaaagcacaagcatttattaaatagctttctatatctttctgagttttgatcctttgattgcagactgatgtaatattttatgtaaatcattgcttggttactaagtgaactttaagaaaagtgagacgtctgcagaagttgcccataatttagcagctactgtattgtaccattgatgtacggctttattttcttgattaattatttaaacaatataattcacaattttaaaataataaatttccacttaaaatggtatttaaactcagcaaaatatatcatctatgagtaaaatttgtatttaccaagcaaaaatattacagtttgtggttcacatgctgtctcactgttttaaattttaaatacaaaaactccaagtaggctgggtgtggtggctcacacctgtaatcccagtactttgggaggctgaggcaggcatatcgcttgagttcaggagttcaagatttgcctgggcaacatagtgagatcctgtctctactgaaaacaattagctgggtgtggtggcacatgcctgcggtcccagctactcaggaggctgagataggaggatcacttgaaccctgggggacagaggttgcagtgaggcaagattgcaccactgcactccagcctgggtgacagattgagaccctgtctcaaaaaaagaaaaaaaaaaaagaaacacaaaaactccaggtggtcgcacagaatgacaggactgaagtaacttagctccaatttctgtcttcataatcactgtcctaccattgtctgtgcttagaatctacttgcttaatgcaggaacatgtgttctcacagagatggaaaatgcaaatggcgccagaagcaagctggaaattctgaaccattaagaatttactctctgccaggcacggtggctcacgcctgtaatcccaggactttgggaggctgaggcaggcagatcatctgaggtcaggagttcaagaccagcctggccaacatggtgaaacttcatctctacaaaaatacaaaaattagccaggcatgatggtgggtgcctgtaatcccagctactcgggaggctgaggcaggagaatcgcttgcacctgagaggtggaggttgcagtgagccgagatctatctgcaccattgcacttcagcctgggagacagagtaagactccatctcaaaaaaaaaaaaaaaaaaaaagaacttactctcaaaataaatacgtgtggctgactccacatatggtagggccaactgtataactagaagttctccaaataacttctgtggagaaaaaaaagtttattaaaggttaacttttttaaagtgctaactagaaccttactaacactgagatcgcaccaattgtttataacttagacagggccgggtgcagtggctcatgcctataatcccaacactttgggaggccgaggcaggtggatcacttgatgtcaggagttcgagaccagcctaaccaacatgatgaaaccccatctctactaaaaatacaaaaattagccaggcacggtggtacacgcctgtaatcccagctactggggagggtgaggcaggagaatctcttgaacccaggaggcggagattgcagtgggccaagatcgcaccattgcactctagccccagcaacaagagtgaaactctgtttcaaacaaacaaacaaaaaaaaaaacctcttggaccaggaaaatattttttaagggaggagtattttatcactggcattgtttaggattgcaggcacatgatgctaatgaaaagcagactaactattagttggttttattactgtttttgaactctctctctcccttttttttttttttgagacagagtctctctctctgtcacccaggctggaatgcagtgactgcagtctcagctcactacatcctctgcctcctcagttcaagtgattctcgtgcctcagcctcccgagtagctgggattacagggcaccacaccaggctaagtttttgtatttttagtagaggcagggtttcaccatgttgcccaggctggtctcaaactcctggcctcaagcgatctgcccatcttgacctcccaaagtgttgggattacaggcgtgagccaccgtgcctagccctgtttttgaactctctagagacagtccagccccttattacttgtcctgaggcagctgctcccttcacctggccccccgcattgtgttccggacccttgtcctggtggtgctaaagaatatctctgtcgatcctttggggactggggaaactgaggcccagtgccacgcgatgccatttgttcagggaagattaggtcatctgctaggtccccagtcacttgaccttcttcccagacaggaagaagctgctctgggtctctcagtgctccacgtgtctttgcacattgaaatgttttctgatttttttttttttttttttgctgttacatttacttttaaaaaataacaagcaataaaatgttacatttgagaaggttgaaatgagaattgatttgagttaaattctagcagatttttcttagaagaatgatatcatcatctccagctacctgcaattgatctactctgaattaagaaagagacttccatttgttgtttatattttgcactcttgatgtgtttctttaaattatggtcatgggccaggtgtaggagctcacacctgtaatcccagcaccttgggactctgaggagggaggatcactggaggccaggagttcaagacctcgtctgtacagtaaattttaaaaattagccaggcatggtagcattcacctgtagtcttagctacttgggaggctgagatgggaggattgcttgagccagaactttgaggctacagtgagttattttcacgccactgccctctagcctggctgacagagcaagacctgcctcaaaaaaataagtaaaaaataaattaaatttcaatcattagcagtcattaggatatttaaatacagtatgttgaatcaaagttacgcatgtgtgtatttttttttccagagagttgtttatcatgtgggttttaatttaactttaaaaaaatgttggctggacagttgcccaaatggtatcatcagccatttggttgagaacgtatgtcctgcgggctcctctgtcactggagttttgctagctgacagccactggctagttagagactgcagtcagcacagatgcaggcgtggacttgcgcacgtaaccatgtcaatgcaaagccatcacttcttaaaaattctgaaccctgctgtctgagatggtggtgcagcggatagaactctgctctaagaggcagtagctaattccatgtcttctttgcccttgactagctgagtgactttgcacatggggcttgcctctctgttgccttgtctgcaaagtggaatcatcttttccttgctagacagaaggtggaccctggacctatggcctttttgagtttcccccccgcttcttagaaggacctctgatcctactgagtttaatacccacgggttaataattgggaaaagcaaaggaagcgcttctgtttaggtaattatatgcatgtttttgtctttttctggctggaaagatatccaagccactgggaaggtccgtggctacccagggtagccctctctggggagggctgctatatccaagagcccctcatgagaatttgaaaatcgaccatggtagggcctgctgacttttgacagctaatggtgtgctgagaattgtccctccaaagatgcctttccattccctcgggagagtctgggcagcccctactgggggctgggatgctggctcttccctcagcctccaccccaactgctctcttccctcctcccctccccagccccctaatttctctcacaaggctttgttctgcagcaacctttcctaatgcagtcctggcctcttcgcagcttcattacataaccttccgtggactcctggtccaaggatcaccccagaaagccagtcagaggtaggcacgcagctggggtccatttacttaccttccccaccccctcggaactcagaggtggtgcaggaatttggactccaagaattaacagctccaccaccatcaccagagccaaaactcaggatgcatgtgcttcatctgctgcttatttccagctgagagccagtggtgccatggttccttagggagccggtcccctgatgccggctcctggccccaaatctctctgatccgggctcttccagaatgtcttgtctccaccatcgcctttgaccaatggtgtccctttgcctggtaatgtcccctttgcctgatgatggccctgtcactcctctctttagcacagaggaggctgtttcatcccttcaagcctgccctcccttcaagtcttagctcaagttcaccttctccgcagagccttctccaatcttcttgactacgtctcctctcagctccagcaacctctgtctctggcactgattccttacttagctaagagaatcacagacacttggggctcaggacaatctgctttctctcttcttacccatggccttggactgtgtgtacctctttgtctccactcccaaacccaacccccagagggcagagagcatgttgtctgtccctttgctcagcatgaagccatgcgtgtggtagatcggcagagttccataacttgtgttgaccgaggggtcactttgctctgaaattacccctgtgtccttcagtatttgcacagatagcttcctggccagaccgaatatatccaagggcatggcccacctctgctcctgtttccaggtccctggtgggggttagttcatgccttcctcataatctgcccactggcctggtcctcaaggtcttcccaactgctcagccagagttgagaaaatgggtcgctccatcctgtttgtgtcgttctctccttcctggcccactctcctgcccacaggtatccaggggctgcctgtagcattagaggacatacatgcacatgcgtgggcatgggacactcacgtagcctccaagcacagcatcaataatgcattctgtgctttatagcatggaaagctgctctaaactttattacacagtggacatgtctgaagcagctcccaaatccacccctgagtgtgttggaattggcaagcctatcacttgggagtctagtttttttgttcgttaataatagatgcttcctgtggccccagcttggcaattttgatttaaagtgatcttaactgaagagactaatggacgggtctgaatttgtgccttttaagcacaaagtattgctcttaattaactggattctatcctttgagcaggcagaggccttcccccaagggcgtcattaacgatccacatctggacatcttccaaagccttcttctgtttcaggccaaccgcaggtgtgttcctgaacacccaggaggctatgagagccacatatgcctcccaaatacacacagtgtgcatgcccagggacatagagcagtgtgcaaagtcccattccatctctctccacctgggagaggatggctcttctgtctgattcatggctcaaagtggtaaaggagctccccactccccgtcccacgcctactcagagtctgcaaatatgtatgcgatatgagagctcgtcagttagctgtcttcagtgtggcgcacatttgaggagtctgactcccctccagcacaggccaatgtgcactgctctcctatctttgtacccccactgttgcactgtgcagaggttggagccatagaagtaccagagctgtgaaaggagaggccccctctcacctctgccctggtctccatccccactttctctaggaagctagtaggtgctgacaggggagagaagggaggggaggggtccagaaacagtggctcatgcctgcaatcctagcactttgggaggctgaggcaggaggatcatttgaggtcaggagtttgagaccagcctgggcaatgtagcaagaccctatctctacaaaaagaaaaaatgtaattagctgggtgtggtggtgggcacctgtagtcctagctacttgggaggatgaggtgggaggattgcttgagcccaagagtttgaggttacagtaagctgtgattgcaccactgcactccagcctgggcaacagagctgagaccctatctcaaaaaaagaaaaaaaaaaagaaaggagagagagagaaagaaaagaaaagaaaaaaaaaaaagaagggaagggaaagcccagaagagtgtggggagaggaggcggccgtcattctggggccctcagtgtgcacaaccagataacacatgctctgtgggcttttgtaccattttgcttgagcataaagaaaggaaggctgcccctaaatagaaagcactctggaggcaaacaaatctgactccaatcctggccctgccactttcccagctgaggacttagacaagcaccctagcctcttggacattctcagagccatctgctgcaagtgggtgctgccatacccaccttactgggcaggcttgggggaccaagggtggtaaatggctcagtctttcatgatgcggccacacagcaggtgcgccatccaggtccatttctttccttcctttcccccaaatcaagttgtcattaaagtactagtccacattaatgaaatcaactgtattaattttctatttgctgctataataaatcatcagaaatttagtggcttaaaccaacacaaatgtattaccttacagttctggaggccagaagccctccataggtgtcactgggctgaaatcaaggttttggcaaggttgcggtcctttctggagggtccaggggagaatccattttcttcctttttccagcttctaaaggtttcatgcattccttggctcatgatcttctatagctatagtcagaaaaattttccatcaatcatcttcaaagccagcaatggcaggatgagtcctcacatcaccttgctctgacaccagttctctgcctccctcttccacatgtcaggaccctcatgattactttgggctcactctgataatctgggatgatctctctattttagagtcagctgactgggaaccttaattccatctacaaccccaattcctctttgccatgtacagtgacatattcacaggttctggggattaggacgagcctgtctctgaaaggctactttacatgaaaattcatttttttaattaagatttttttttcctcttgagacaaggtctcactctatggttcaggctggagtgcagtggtatgatcacagctcactgcagcctcgacgtctctgggctcaggtgatcctcccacctcagcttccctagtagctggaactacaggggtgagcccccatgcccagctaatttttttttttttttttttttgagacagagtctcactcagtcacccaggctggtgtgcagtggtgcaatctcagctcacagcaacctccgcctcctgggttcaagtgattcttgtgcctcagcctcccaaggagctgggactacaggtgtgcaccaccacgcccgactaatttttgtatttttagtaaagatggggtttcaccatgttggccaggctggtctcaaactcctgatctcaagtgatccaccaacctcagcctctcaaagtgctgggattacaggtgtaagccaacatgcccggccccagctaatttttaaatattttttttgtagagatggggttttaccattttgtctaggctggtcttgaactcctgggctcaagcaaacctcccaccttggtctcccaaagtgctgggattacagcatgagccactgcactcggccttaagagaagatttaataattaatactttacaacaagatctggaagaggtgggatgagtaactaaatgaggatacaagtaacccgggtcatatttgctaatacccttggtcacattgaacttgatatcttatcagattttcctaatcagctcctttagcagcagtgttgcagcatcttatctcattttgttttttgtttttttgcctagcacatgcctgtaaatcactggattgaggtgtttagatgtttgttgtcctttggatgcttcttataaatccatatttcatggctccctggaaagtgctatgcaaatgataagctgcaaggatggaaaggaaattgcagtgctcctgaattgtaaatgggcttttacgaggaggtttctaattactcgctctttctcttgaactgaggagttgaagtgtaggtggcagatccataacagataatcatgtgtgtgatgtgacttcagcctgagcgtcgaggaccaagtcacagagcaggaacagccactctccagtgtccttggggctacgtctgaggagaacctgggatttcatatatgacctgcactggctggggggctctcttgacgtaacgtgttccctctgagcatgttacagattctgacattcttatgttccttctgtggagagacatgtacttagtgacctaactcactttagcatatttttgctcatcgtttgtgtagcttaaaggaatcagataattaccccctccccactactttcggaagcacaaatgcaatgccctagaattgtactggggactcaaaaagaaaagagagtagtaaaatctattaaaggggacaaagacagcctatatactacaagctttctatttttatggcagagaatgccattttctaagtaaacagagaactgcatttgacctgcaatatcaaatgcatggatttgatgctttggaaagcaactgttttctgcgttaatctgggtgtcttccgtgaaatgtcctcctgcctttggcttaaacactagctttgtctacagccattccatcctgaacctgcccaatcttgtctgaatcctggtttcaccactgacaagctgtgtgtccttgggcaagttacttcacctgtctgtgcttcagagtcctcatctgtgagttggggaatctggacagaatctaccccatagggcgtagtgaggatgtgttgaattatcccaagtggctacacagagtaagcactcaaatgatgtcatcgttgtcatgattgctgttaccagagcctagagttcattctgatactcgagtctgtggcccatccagcccaggtaaggaatagttggaggagttgggcatgttcagcttgaagaggagacgacaggggatatgggatagttgaatctgtgaagggccccctgggatgaagaactggcatgttctgtgtggctccagggcactgagcaggacccatttgccaaagtctcagggacacagtttctagctatagacagaaaaattttctgtcactcagaggatgaaaatagaatgagcccccttaagaggtaatgagctccctgtcattggaaggattccagaagagctaggtaaccactttaggtgctatcaaggggcttttttctttaaagtcctttccaaaagcttctgagattgcataaacaataggaagccatcttggtgctttaacacaaactctccccagtgatgagggttgagccaaagccagattggcaagcagagaggagacttgtgtacaaggagttcctcgagtcaattgctttttccttgttctagccagccagagggctcctgttggaaaacaggagaccggagaggctgaggcctgaccaaaccagcttctgcaggccagctgggaggccacaactcctacctacgggaaaactgaagggcatctctatttttagattagcaaaagaaaataaatttaagtttgagtctcctttgcaacttttaaaagacatctttattgagatgatcattcacattctataaaattcccccactttgagttacaattcagtggttttagtcttccttgatgattttgatggtcttttcttaaggctcttggaagacccagaagcctctcagacacaggtgggtgtggagggcgtagcacagaggcagacttctcatttcctgggtctcccctttaatgactctcagagacccctccttccccctgcccctggcttctaccccaggggtgtagagttttgccattttccaagcagaacttcatttcctcttctgtgtctacactctttgtgcttctttcttgccagctttttctcctttgcccgcccttccttccttccttccctccctccctccttccctccttccctctttccctccttccccccttccacccttccccccttccccccttccctccttccttccttccctccttccttccttccttcctgccttccttccttcctgccttccttccttcctgccttccttccttccttccttccttccttccttccttcctggtatgtgactaatttctgtttcaggacataaatgttgtccaggctgttctttggtctttctgttggataatggacatttggcattgagagaggctgctttttctgaaatcatgttcttggggcccagaacctaggtgtgtgcttctgactttgttttcttcctgatccaaattctgatatgtccatttaaattgatctagacccacagggcactgtgggacagatcctcagtggaacatgactctgtaacgagagcattttgttttgtcaaaatgagaacatattattgcctttcatctgattgtaaacataatacatgtttataaaacagtataatgagacaaaaatgtagacactaataagggaaaatctccctaattgtatttctcttcacagagaaagcccctgttgggcatatatactctagtttgtttatttgtttgactacacatatatgtattcttttcttatgtataaaaattctgaacatgcacatttctgcaactactgttttcacttgatgatgcatggacctctctagagtgtacgtttcttcttccttacaaagcagttggcttcgcccagggtacaccaggacacggttttggctctgtccccagggtgtcacgggaccaggggatgatctcacagggtctgccatctgccctgcctggccggaggctgcatcgagagggccaaggggcaccacgtgtcgtgggtactgtcaaacaagagccttcagagccttccacagtctttcttttgcttcccagcattgcttccccgctggtggactctgaatctagaactagctccaggcgcctctccaaattcagacgggagctggggcactattataatgcaaatctaggcaaagccctcccaataccaggatccagaatggggtggggccctttgccctgaaaagctgtttagtttgaaaatacaaacaggagacagaaaagtttggctaaattaatggataaagttttaacgatggtaaccatagtagggttcatcgacagccagcgatggttctgaacacttgacatgtattaactcacctaatccccacattttacagacaatgcaaaggaggctctgggaggttgagtgacttgccccaaagtcgcacagctcctaagtgaaggattcggagtggactccaggcagcctggtctgactccctgcactgcgctgtgcttatctctggccccaatgccgccatgcagaagtgtctgggggcactttgtctctgtcagacagaattcggagatgtgtatgcttgccctggtatggcacttctctttttttgagacagaatctcactctgtcaccctggctggagtgcagtggcatgatctcagctcactgcaacctccgcctcccaggttcaagcaattcttgtgcctcagcctcccaagtagctgggattatagatgtgcaccatcgtgcctagctaaatttttgtacttttagtaaagatgttgttttgctgtgttggccaagctgatctcgaacttttggcctcaagtgatctgcctacctcagcctcccaaagtgctgggattacaggcatgagccaccatgcctggcagtgtggcacttcttacgtgtgttcagcggacactgtttatcttctgtccctccaagacggtgctgagctcaggtcgttcattactggcagacaactgctgatttccaacagaattgccatcctcttctcccctgcgactttcagagtgtgacctcagactcaaaaattagaagtgaaaacatcttaaaaactatcaccttttcttcctaatcctcctctcccctccctgtcttccttgttgtccccatctaatgaactatcatggcaaaaagagcccatttctggtcattttctgtggcctttcaaactcccacctaccccactgctcctgggtgcattacccgaaagctgagacttcagtgcagaaagtgccaggccctctgtccccccagatcgccttccttgtcttccctgtgcttgcctgtcacattgtgtgggttccagcgctggaaggaatgaggaacagattctctggttctccttttgaagtttaccttcgctccaccacttctgagaccttcccggaagttgccccttgtttctctcctctccagggctgccccagagctgcctctcacctcttcctgctgtcaccccaccaccatcagggcagaagttgggacaaagcctctcctactggctcctgcttttctcccttaggtccagcctcctcttctccatcttcaggagtctccttctccactcacacgtcatgacttcagcacctcgcatcagtccagaatatgactgcttgttcaagtgccacctttctcatgcatttttttctagtgacaatcacagccaccctgtggggcaggagtgtcatcatccccatgtttcaaatgaagaattgcagttcagagagggcaagtgactggcccagcctcaacagctagccagtggaccccaccagggcttctgactccagtccgggttccctttccacccaaatccatggagggagctgagccgagaacaggtgtccttcaggaagacgtgaagccaaagcctccacctccaaactcaggggcccagggagtccaggcacccatccactcacaaggctggatatggtgcattccaggagaggggttgggggcgagtggcctctctgtgtacccgtggggatagatgcgcaagtggcatcgccacatcgtgagtcctggcttcatgggtgagctccaggtccaacgagaagccaagcagggggcccttcaagctcagctttgggcccgggtcggggtacagggtagagcgggcctccccagcccctgccatgaggccaaggcagtgcatcgttcgcagcgtacattcagaaaccaaagcctaggagctggttatcattccggtttacagctgatggaagagcaggtgcttccgagaacccacagtgctctttggccagtgacccaagggtgcctctgagaggcctcgcagcacccggaggtgctgctgaggcaacgccctgactgtaagaaggaccattcatcctcagagagtggccgtgatgctgctgcgacagtcccaccatccctcccgactctcactcccaacagacttcccactgtaaagctgaactctccagcaaatcacctctcgccagactctctcctcactctctctgggtccactagaggttcctcagcctctctttgccttggttttcccagctgtaaaatggagcaaagagggcctatgtacccacaaaggtgtggttggagcgactcctcctacattagggcctcgagtggggcttcatgattggttggtggaggtctccaaacccacccagtgccaccgaaggctgagactgcagatgcaatgccacaggtgtccttcctcagcctgggcagctgaacatcatgtgtaaaacggggataataagataataacagccccttgcacctatgtggctgtgaggattaaacaagataaatgtgtaacagtgcctggctatagaaatatttactcttgttattaagggaagaatatgtgtggctaaaaagggatcgaagatgtaaaagccaatccctccccctctagcatatttaagggtaatgttgagttggtttgtggaccatttgctgcctgttagagctggaaggtagggaccccctctcaacagcgatgctacaaattatacccattggaggtcaaccaaaagacaaagcttattggctggacatggtggctcacacctgtaatcctagcactttgggaggccaaggcaggcggatcacttgagatcaggagttcgagaccagcctggccaacatggtgaaaccccatccctactaaaaatacaaaaattagctgggcgtggtggtgcacacctgtaatcccagctactcaggaggctgaggcaggagaatcactagaacccaggaggtgaaggttgcagtgagccgagatcgcaccactgtactcaaaccgaggcaacagagggagacgcaatctcaaaaaaaagaaaaaaagacaaagcttgttaataccagcatattgttaagggaataaagtaggctgcagaacaactggtgtaatatggtgccatgtagggaaaattacatgtgtgcataggagaggggtctgcaaggttgtgccctaagatgttagagtggttcctttgcttttctcttttataattttgtatttgacttttaaataaggaccataaatcacttttataaaatacattctctccagcccctactactcctttaaagaataagagtggtttgcccaagaaagacagttttttttgctctggttttcttgattctgacatcagaggaaactccttctcatccacttggggctctgggttcaggggattcatttcaggcagattaaagtggtgaccaggggcattcgtggacacagggagggacaggagcaccatcagtttgtctcacacaaccactgtcatcctcactgaaggctgttgcctgatcaaaaacagtattgggccaggcacggtggctcacacctgtaataccaccactttgggaggctgaggtgagtggatcacttgaggtcaggagttcgagatcaacctggccaacatggtgaaaccttgtctctactaaaagttcaaaaattagccaggcgtggtgggtgcctgtagtcccagctacttgggaggctgaggcaggagaattgcttgaacccgagaggtagaggttgcagtgagccgagatggcaccaccacactccagcctgggcgaccgagggggactctgtcttaaaaaaaaaaaaaaaaaaaaaaaatatatatatatatatatgtcaaaaatggggtagtttttagatctatagtagttctaaaaacaaaggccatccaagcatgacagatttacaagcactattggctattccagtagttacaatggaggagagaagcttttagttaaaacaaacaaacaacacaacaaacccagaaaccttaggtcaaaaccaaaattgtcctctcagacacaatctgggaattttctcatgacagtgggcattagccaactgacatcagcagcaaccatccgtgtgcacacagtggcaccacctcctcccaaaaagcagccttcatctatgccctcatacaatcgttgattattctctttggattgaggcccggaattatttaagtttcttcttgccagcatgagtctttcctttctgtatgctccttatcttctctctttaatttggcagttctgcttgaaatctgggtctttcattagtagtagttcaatttggttccagaacattctgtggtgtgatgcaatgtgaccagagctcacacttcagagctcttcaagggccagtcttactgagcacctcccagtggctgcctgtgtgctgggcgccacttgtggtgggcaggagagaggaggggacacaaaaggagacacagctccttcttagaagctcaaagttggggaccagctgccacagaagagtatgtttagcatctgagacaccaagatccagcgtcacaagggtgtttattaagcctcctcatctctttctttttctttttttttttttttttcctcaggcagtcttactctgtcacccaggctggagtgcagtggcatgatctcggctcactgcatgcaaccaccacctcccgggtttaagcaattctcctgcctcagcctccccagtagctgggattacaggtgcccaccaccacacccagctaatttttgtgtttttagtagagacagggtttcaccatgttggtcaggctggtctcgaactcctgacctcagatgattcacccacctcggcctcccagtgtgctgggattacaggtgtgagccaccgcgcctggccttgctgttgattcatctatagtatgtttgacttgatgacctccagttaccttagacagaggttctcatctaagctccaactttccatttcctttgtcctcgtctttccccttaacccctccacatttctctcaaaatcaccccacttctaaaaaatactgtttatttttcttttaaatttcaaattatctatactcattgaaataaatcaaaatagcatggaataagcgaaaaaaatggatcccacccttccccactcccattccctagggctaaccatagttaaccatttaatgactaggtttttttgttgttgttattttttatttatttattttgagacagagtcttactctgtcacccaggctggagtgcagtggtgtgatctcggctcactgcaacctctgcctcccaggttcaagcattctcctgcctctgcctcctgagtagctgggattacaggtgcctgccaccacacctggctaatttttgtacttttggtagagacagggtttctcaatgttagccaggctggtctcgaactcctggcctcaagtgatctgcccaccttggccttccaaaatactgggattaaggtatgagccaccgcacccagccctcctgggctcttttcctttagttgcactcgctccccgctcctggagtagagggatttccgagagactgtgggctccagccttcacctaggcccaggactaggatgcctgccctaacatttatctttataccttaaagcaaaacagctggaccataagcattcaagaacaaactgtgaataaggagaaagttctcccaggaaacaagagctttagttatgttgggccagcccttatattccttagctgttaccagtcactgcttgatttaatctcggctatcacttggcctgacaggtctgctgctggtgccaggatgtctgggttttgaagcctggctccattacatacttcctgtgtgaccttgggcaacttactcaacctgtctgttcctcagtttccccagctgtattatgtcagcataatagtttgttgtgtgaattaaatgaggtaataactggaaatgcttcaaacatggttcctatcatgagaaatcctgctttccgcctaaatgtgctggaaaattcctggtggtgcagaacaggagaccagagcaaaggaaagacagggtgcagaagccaaaaattaccttggagaacaaagcgcatgttaaggttatttttggattctaggtttatctctgcttggtcttcagttacctacaagagatccatttaggggatttttgtttgtttttaacgatagctttattgagatataattcatatgccataaaagtcactcttttaaaatgtttccggtatattcacaaggctgtgcagccttccctgtccttgattccagtctgagtttttaactgaagggataaggaggaccacgctttccccagaccagaaccgcgggccagggggcgattccgctgagtcaccgcgggcgcctggtgcgcggcggcggagcccgggaccttccttggctgccccctagcgagggccgcagcgcagcctgagacacccgccggggccgctccacggccgtcggatttagactggaagctcggtccaggtccccagcttgatgcgcccgcggtgtaggagaccagcccgactcgagcttcccctgagcccctggactcttgactccagcagggcctgggtaatgaacgtcagctcccctttcccaaaggggttgctctgttgggaaggcacccgtttgatacagtagcatagagatgggttttagcatcaaaatatcagaattcaagccttgctctctgcttactagctgtgtgaccctaaaaaggtttctgaacgtctctgagcttcagtttcctcatcattccttctcacggggtggttgtgagcattacagagatcctctctgtgaagcccctgtgagtggctcatcctgagggctgaaataaacatgttattaataatccaaaactggcaagggatgttgactggtccccctcccttgcccaaggagctttctagaacctgagttatcattaccaaactgtactgccttgagtaagaaagttagaaggaatgggaaggatggtggcaggtggaggaaggcggattggtcatcacctccttgcagcaagaaacagccccagatcgtgggaaacctacagacctgctagacagactaggagcaaaagctggggctttaagaatccccagggaggttctcctgagagagtagccagttggattttgtaagcagagatttgtttggggaggaggtgacaacgtagggagcagaggggcaaagctgtcgggaatcctgccttgagggcagggatgtgtgttggggggagttgggtcactggggctcggtggccttgggcaagtttctacctctcaggtcctttacccacctagggtcgccatcctgcccacctcacaggttacagtgagcctggatgcactgtcatgggcaggtgcccaggaaaatggcagacatgttccaaacagcacgcagcattccccagtgatgcccagggtcaccttggaggtgggcgagatgcctggggtttctcgtccaccccacaacacctcaggggacagccaaagctgtcccttcaggtaagctgcacagaagatgtgaactctgctgcaaagactctattctttgggagcaaaagggacccagggtctcacctgcacatccctgtccctgagggcctaggggttcttggaggccccagccttggcaaaatgaggaagaaggtgaaggttgtctgggcccctgccaggctccttcctcggccacgcactccccttcctgcacacacacccttctccctccaccccatctccattgttgtcagaaaagtcacaataaaaaggtccatattgtctagttcccatacttttaatttttaaaattttatttatttatttatttatgtattttttgagacagagtcttaacccaggctggagttcagtggcatgatctaggctcactgcaacctctccctcctgggttcaagtgattctcatgcctcagcctcccgagtagctgagattacagatatgtgccactatgcccagctaatttttgtatttttagtagagacggggtttcaccatgttggccaggctggtctcgaactcctggcctcaagtgatctgcctgcctgagcctccggaagtgctgggatttcaggtgtgagccaccgcactcggctccacacttttcacttattaaaagactgtggtgtccatcaatggatgaatgaataaaccaatgtggactatccctcccattacccaaggaatgaagcacggagccgtgccaagatctggattcacagtgaaagaagccagtcaccaaaagccacgtgctgtgtgacttcccttatacgaaatatccagaagagatacatccatggtgacagaaagtagatgagcagctggggactggcgaaggggagaagggggagcagctgtctatgaggtccagcctttcttctgggtttggtgagaatgttttggaactagatagaggtgatagttgtacaacattgtgaatgtactaaatgccactgaatcattcattttaaatcgttctttacgttgcatgaattttaagtcaatcaaaaacagttgtttgaaaagagaaaagcctatgggtagcggcagcagtgattggatttatgattcgattccatggctcatccctcccctgcctcaccccctcgccctccgacgtcttcttcttttactctgaactgttatctttgttctcatctctctctctctctctcaaccctgcagacacttttccctttctttgtctgcccccaccctccagatttccgtgtctccagtgtctccctacgaggcatgaattgagactgggagggtgtgattctgaagaaggcaccaacagtgactcagctagccccttcccccaccccgccccccgggcctcaatttagctaaaaaaccacagggacggactcaggaggcaatacctttccaagggtccctaaaaaatgtcccattttagtgtccaggtttcactcaactttagtgcctcccctaaaatgtgttccttacctcccaccccactgcatctaagtcactgcctgagaaaacaggattgaggaaaggagaaaggaagagagagagagaggaggagagagagagagagggaggaaggctgatggatttagaaaagaagaaaacaagtggtctgaggaaaacagccttggtgtgtttattttcctgtctgtgtatcgcttctcggccttttggctaagatcaagtgtattttcctgtctgtgtgtctcgcttagattacagggatctgtgggtgatgacacgtctggtccaggctgcgtagtcacctcaagggcatgcttattgatgtgtttttcaattcactatctttgcatgggagtcccaggccaagaggcacagctgcgccatttgtctgttggtttagatatcctttatccagttcttccagagaaatcatcctgcccttctggaggaggtgggcagcaggggtcagagatgggagggaaaggaaggagccaggtccttggctaggatgccagggtcccctgcctctcacctggcctgggctggaggcctcctgctgtcctgtcactgatcactaccccgccccagcctcctgagttagaagacacaggctaaagtagagtatttcttcattgaaaaacccatacaaaataaaggttcataaaaaataaaaatttagactgggtgctgtggctcacacctgtgatcccagcactttgggaggccaaggcaggtggatcgcttgagccctggggttcatgaccagcctgggcaacatagtgaaaccccatctctacaaaaaatacaaaaaattagccaggcatggtggtgcatacctgtggtcccagcttctcagcctatggacccacatagaatacaatgtcagcataagaagggagccctggggtcaccaaatggtttgggcggcaaagaacctgaaggttgagagaagtggcttggttacccagctgttggatgtgagacctggccactgcttcttccataccctagacctgcaccctgacatctcaagtaaaaagttgggggatgttttatggtccaggatgaaggaagggcagtgaggggcagcggagcatcactttgcatttctgtctgcctcttactggctgtgtgacctggggcaggtaacttcccagactcctgggaatcataacacctatgatgatgatgatgatgatgatgatgatgatgatgacacctacctcaaggattgccctgaagggtcacagagatgcctgcaaggcacctgcatggagcaagcgccccttctctggcaggtgctgggtgagcactacctgctgccaggccctggggctatggcactgcgtgaccctgcaagtcctacctggcgaagctgtcgttcttgtgctcagtcagtgttggttgtaagactgagaagagtcacttcattttgctctccagggacatctttctgggtcctattttctgcctatgtcaagtagcgcctcaaggatgctcctgaaaatgggcttgtctttcttaacatggcaggtaggtcccaaagcattagcatggggcagctgacctagcccagccaatgcagtgcagtgactcttgcaaccgagtctaatcagaaggtccatgaacctacgagcatttcctgtcccaggatcagggtggaggctgagcctccctgcttagagattcttcccatgcattccacttttttccccaaaagaaaatattgacccttgagaggcacacagtttatttattttgcatagtaaatagtagcctgtattttaaggatgagttgatttctgcatcagcccctgtaggtcatcagccttctattggtgcatctgactctctctagccctgcagggatggtggagggggaggggaaggagggatctttattggaaaccaggacagtgagactcattgccctgtcatctgctctgtggtgctgaatgaggcagcccaacagagaaataccctgagcgagcatccccagcctccaaaacagtggcgcattgccctgagtcctgggaatgacctttgattctcctgctcctgacttggaacccatggaaacctctagaagcagctgaggaaaacccaacatgaaaagcagaactccacactgagaatataggaggtgatcggaacatacaatgattcttgctaagaccgattcacagtttttcttttttttcgatcgaagaaatactggagaagcctaaagaaggagtctaaaaactctggcacgtgggccaaaactgtccttgagctaagaatgattttcacatttttaagtggttgaaaaatgaaataaaataagatgatgttttgtgacacatgaaagctatgggaaattcaaattctaatatctataaatagtgttttatcagaacacagtcatgctcatttatttatgctcgatggctgctttcccgctacaattacgttgagcagttacaacagagaccacgtggcccacaaagccttacaatatttactatctggccctttccagaaaaaaatgtgccgactcttgaccttaacctcagcaatttgggaggccgaggcaggcggatcgcttgagctctggagttcatgaccagcctgggcaacatagtaagactccatctctacaaaaaatacaaaacattagccaggcatggtggtgcacacctgtggtcctagccactcgggagactgaggtgggaggatcgcctgagcccaggaagtcgaggctgcagtgagctgtgatggcaccactgcacctcagcctgggcgacagagcaagaccttgtctccaaataaataaataatgcaaagtaaaataaataaaaccatataaaaaggaatcaatttaaaattataatgaaagctggccgggcatggtggctcacgcctgtaatcccagcactttgggaggctgaggtgggtggatcacgaggccaggagatcgagaccatcttggctaacacggtgaaaccccgtctctactaaaaatacaaaaaaaaaattagccgggcacagtggcgggcgcctgtagtcccagctactcgggaggctgaggcaggagaatgtcttgaacccgggaggtggagcttgcagtgagccgagatcgtgccacttgcagtccagcctgggcgaaagagcgagactccgtctcaaaaacaaaaacaaaaacaaaaacaaaaaaaaattataatgaaagccaaggggcatagtagaacaaattttctagagctcattaagtcaaatgagtcaccagttagtaaaacgcagtcacggggaagagagggcaggattctttgaagcagcggctctcctaaaaacaacccacccttgtccagctgccttccctcctgagggtgttccctttgactgtgtgacccccatcccctatttcccaaccgtccaagcccacctctagcataatacgagcttttaatccctctccctgaccccaacccgattttgaagcccagtctagtattttctcaaatacacttcttggctccattccttcctttccatcacctctgccttttcactgcatgcttggaccactgcagtcagctccctatgaacagttgctctctacccatccaatcggccccgcctgctgctgccaaattcaccgagggcacctctgtggtgctgcctgtggacaaagtccaagccagccacctcacccacctacaggtgagtggggagcagccagcgtgtccagtggtttaccccatcgccacagacttggtgatgtgtcgatgtgcagagaaggggtgttggcagccacaacacaagcaaccccgccccatgtgagatctaagatgggcgtgctgggagccacctctgagaatccaacagaaggcagaggggagaacggctcacacggcacaaacactccttccttttttttttttctttttcctttttgaaaggagtctcactctattgcccaggcaggagtgcagtggtgcaatctcagctcactgcaacctccgcctcctaggttcaagcgattctccagcctcagcttcccaagtagctgggattacaggtacactccaccatgcccggctaatttttgtgtttttagtagagacggggtttccctatgttggccaggctggtcttgagctcctgacctcaggtgatctgcctgccttggcctcccaaagtgctgggattacaggtgtgagccatggggcctagcctccttccatttaaatgtatgcctaatttgcccattgagaacggctgagacgcattttaagtggccagggtctacttagagttagtgctcatgaccaggcccaggtcaagcctggctggccagatggtgcctttgacctgctctgtctctgtgcaaaggaatgagctgaaggatgggggtgcagtgtgtgggcagtgggctggggctggcaggactcagtgactaagggaagagaactttcctcactaccagcctgtcttttcagggcaccgcggggggctttgggacttggtgatgaacacagcacagagagctgtccagcatgcgggtccctggcttctcacacttcccaggctccttcagaggctctctccaaagggagctgctctctctagaacccatgaatttggaatataggcaaccactgcattggggaccactgacctcaaacatagagaccagagcaaatggggctcatcacgtgaaactcatctggaactctagcaggttcttttatatatatatatatatatatatattttttattattatactttaagttctagggtacatgtgcacaacatgcaggtttgttacatatgtatacatgtgccatgttggtgtgctgcacccattaattcatcatttacattaggtatatctcctaatgctatccctccccactccccccaccccacaacaggccccagtgtgtgatgttccccttcctgtgtccaagtgttctcattgttcaattcccacctacgagtgagaacatgctgtgtttggtttttttgtccttgcgatagtttgctgagaatgatggtttccagcttcatccatgtccctacaaaggacatgaactcatcattttttatggctgcatagtattccatggtgtatatgtgccacattttcttaatccagtctatcattgttggacatttgggttggttccaagtctttgctattgtgaatagtgccgcaataaacatacgtgtgcatgtgtctttataacagcatgatttatattcctttggttatatacccagtaatgagatggctgggtcaaatggtatttctagttctagatccctgaggaatcgccacactgtcttccacaatggttgaactagtttacagtcctaccaacagtgtaaaagtgttcctatttctccacatcctctccagcagctgttgtttcctgactttttaatgatcgccattctaactggtgtgagatgttatctcatggtggttttgatttgcatttctctgatggccagtgatgatgagcattttttcacatgtctgttggcgaactctagcagcttcttttcacaagttcatggagagaggtttcccactgagggaatcacatctgtctgatcaaaagaggcttgggaaatggctctcctgttcattccctgaaaacctctgatggaaccactgccactgtggcagccccagcactggcaccccagccatgattggtgccccagccacatctctgctgtgagccccagagccctggttaattaatcatccacgtgttgatggggagaggcccattcacaaaagcgacataaagcccagggagacgtggccgtggcaagaagggtgtgggactacattccgcccccaactgagagattcagaaaccagaaaaaaatggaaaaacatactgtgctcttgggtgggaaaactaaatatcatgaagggagcaatttttatagttttggcctataatacaattccagccgaaatcccagtggaactttgagaatttgcaggaaaaaaaaaaatgtctaaagtacatctggaagacaaacttacaagaaggtcaaataattttgaaaaagaaaatgatatctaagcccacctagagaataagacttgagatccaaagctaaatcaggaggctctagcaaaattgacagataagcaggacagagtgcatggtgcattcacctggggaagagggcagattggtctacaaataggcctgggtccactgactttagctgttatatttggggagaaacttttcaacctcactccatcttaaacctaaaaatattccagatgaattaataaatataaaaaattagaccactaaaaatgtagaagaaaatggatgatctttctataccatagagcaatggaataaatcacaaaggaaaacagatttgactatataaaacttaaaccctgcccatcaaaaaccatcagaaaccaaaataaaaggcaaccaactggagaagatagttgccacaaatatgatcaagggttaatgttattcataaattaagagcccacacaagtcattagaataagcactgagacctgaacagacaagcaaaaagaatgagagtgggtcggcgcggcggctcatgcctgtaatcccagcactttggaaggctgaagcaggcggatcacttgatcccaggagttccaacaccagcctgagcaacatggtgaaaccctgcctctacaaaagtcataaatattagccgggtgtgatggcacacgcctgtagtcccagctactcaggaggctgaggtgggtggatcacttgagcccgggaggtagagtctgcagtgagccaagatcacaccgctgcactccagctggagcaacagagtgagaccctgacttaaaagaaaaaaaaaaaaaaagaggagaaaaatgctgatctcactagtaattaaaacatcaggccaggcgcagtggctcacacctttaatcccagcactctgggaggctgaggcaggcagatcacttgagatcaggagttctagaccagcttggccaacatggtgaaatcccgtctctacaaaaaatacaaaaattcgccaagcgtggtggcacatgcctgtgatcccagctactcgggaggctgagacaggagaattgcttgaacacgggaggcagaggttgcagtaagctgagatcgtaccattccagtccagcctgggctacagagcgagactctgtcccagaaaaaattaaaacatcacatatttaaacaactctaggatatcatttaaaaaaacattaatagactgttttttagagcacttttaggttcacagtgaaactgagtggaaggtacagagacttcccgtatgttccctgccctccacgtacagcctcccccactgccaacgtcctgcaccagagtggtacacttgttacaaccaatgaatcctcattaacatatcattatcacccaagttcatagtttacattagtaaaacatcatctttcatctataagcacaaaaattttttggcatttatttaggtgtatgattaactcagtgttgacaagactcacacttcatacccacttgcactgcatctgagaagcaattggtgtctacagccgctacaccctcaacaagcccgatcttgtttgaaaagcaattggtgatgcttctcaaaattctatggacaaagtcagccgggcatggtggctcatgcctgtaatccctaaactttgggaggccgaggcaggcagatcacctgaggtctggtgaaaccctgtctctactaaaaatgcaaaaattacccaggcatggtggctggggcctgtaatcccagctactcgggaggctgaggcaggagaatcgcttgaagcaaggaggcggaggtttcagtgagccaagattgcaccactgcactccagcctgggtgacaagagtgaaactccatctaaaaaaaaaaaattatggacaaagtttttcaaaaagatatttaatgcaactttatttgtaatattggaacatctgaggccatttcagtgctaactattaggggatggttaggaaaatatggtacatatgtggaaaggaacatttggtagttagtgcccctgatgtttacaaaggcttttagtgaccaacaaatgctcatgctataatcttatgtgaaaaaagcaagtagcataattgcaactatatttttaatgcatagaataaaaggctagaaggaaatatcacagatccttgacatacattcccaaacctttgtaaatccgcggattcatgaaaacagacacatttgcacaagtgcctgatcttttctgttatacattcattagaagtcaagccctggtgccacaaagtatctgccttttcaaatgtgatcagaatgttctcttttgcttcaaggccatttttcacgaagcagtggcatttttgcctcttcatcagagtcaccgtgtgccctggaggactgagaacagcagagccgttttaggatgggacagggcagccaggaggattgggctcactccctactgagtgcctcactcccgtacagcccccatagaggaagaggggttcaaatttattcctcagccagatggcatgtgccgcctgtcctggaatttcacatcacttatgatggaccaaaattccaaaagctgaatccatgattgtcaaagtctggtatggcaggatgtcaacagtaatcgtttctgggcagagggatgattttctcttcccatcttgctttgtataaatacattttctataataaggttgtattacttttctcatcaagaaatagcaaagtactgttttactcaaaatatgaatagagccaggcatggtggcagcttatgcctgtaatcccaacactttgagaggcggatatgggaggatcactttagcccaggagtttgagaccagcctgggcaacatagtgagacccccgtccccactcccccaaagaaaacccacaaagcatttatcctggattattcacaggggccaaaaaaaaaaaaaaattcaggcctcctatagccatgagctacgaatatgaaaatatgcaaatgtgtaagaaaagccagcacatccgatttttacttttactttcacacctctgtccaccatgttccaagagaagaaacttggtcattgaaaggaatagatcaaatccaaagaacaaaaccactgtgctcattaaacttcttagtgttcacaaagctttagctgcaggttgaatggggcaacccgaattggctggctcacctgggctgcagggagcagagatcgcgacactgcactccagcctgggcaacaaagcgagactctatctcaaaaaaaaaaaagttcataaattcaaagttatgaattatttttaaaataataataatttacaataaagatgaggacaaagtgtgagtaaatggtggtttctatccagctctgttgagctgaagtggcatctccctgctggggcttttggggaagaagggtgtgtgttgctcttcagatcccaagcctcatgcccctactgggccctgtggggtgcttctcagcccaccaggagagccaccgttggaacacacacgtgggggacctggtgggtgccggtgtggtgaatgggggccacagcctgactccaggaagccagcaaactcggagctggaggagtcaggacacccccgatgagtcaagagttggttttgctgccagttgacatctgattgaaccatctcttcacttctccgtgcctcactttccttaccagacaggctctgctgatgctgtccctctcctgttcagtcgtgccctcaccgttaaagagaaagagcaaactgctgggcagcagcattgatttttttaatgaagtggaaagagagctgggaataacaagtcgggcccacctcacctgcctcacctggtgggtttatttgttttgtttttttttttttgttttgagacagagtttcaccctgtcacccaggctggagtgcagtggtgtaatctcagctcactgcaacctccacctgccaggttcaattgattctcctgcctcagcctccccagtagctgggattacaggcacctgccacatgcctggctaattattgtatttttagtagagatggggttttaccatgttggccaggctggtctcgatctcctgacctcaggtgatccacccacctcggcctcccaaagtgctgagatcacaggcgtgagccaccatgcctggccgtcacctggtggtgttgaatatgaactgctgcggtgttggtaaattaagcaagcagatagatgtaaataacgcttgggcaggaatatggagcacgggatgaggatgggcggccaactgttagagagggtagcagggaggctgagatctgcctgccatgaactgggaggagaggctcctctctctcttcacccccactctgccccccaacactcctcagaacttatcctctcctcttctttccccaggtgaactttgaaccaggatggctgagccccgccaggagttcgaagtgatggaagatcacgctgggacgtacgggttgggggacaggaaagatcaggggggctacaccatgcaccaagaccaagagggtgacacggacgctggcctgaaaggttagtggacagccatgcacagcaggcccagatcactgcaagccaaggggtggcgggaacagtttgcatccagaattgcaaagaaattttaaatacattattgtcttagactgtcagtaaagtaaagcctcattaatttgagtgggccaagataactcaagcagtgagataatggccagacacggtggctcacgcctgtaatcccagcactttggaaggcccaggcaggaggatcccttgaggccaggaatttgagaccggcctgggcaacatagcaagaccccgtctctaaaataatttaaaaattagccaggtgttgtggtgcatgtctatagtcctagctactcaggatgctgaggcagaaggatcacttgagcccaggagttcaaggttgcagtaagctgtgattataaaactgcactccagcctgagcaacagagcaagaccctgtcaaaaaaaaaagaaaagaaaaaagaaagaaagaaatttaccttgagttacccacatgagtgaatgtagggacagagattttagggccttaacaatctctcaaatacagggtactttttgaggcattagccacacctgttagcttataaatcagtggtattgattagcatgtaaaatatgtgactttaaacattgctttttatctcttacttagatcaggcctgagtggcctctctttagcaagagttggttagccctgggattcttactgtagccacattaataaacaacatcgacttctaaacattctataataccatcttttggccaaattgacttcgcctcttcctctctctttccaaatgaaatgtgtttcatttcactgtcagaccacatggttggggaccccacagagcacacagccctccctctgccttcccatgctggcccttcacccactgctggagtgccaggttggtccaagggttggaccaagttgtctgaggttgtctcaaggttggtcgaggctgtctccgcgctgggttgtgctacaaggagcccttctttccatgggtgtggctggcagtgagtgctcacagcaacagcccacagtgcagcccgagggcaggatggactcagtccctgcctccatacccatttctaaggaggcaaaatggcaaacactctacttttctcttttaatgctaaaaataagaaaacaccttgcagcccagggtatgggtagtgcatggaagccgtggagttgtgaggtgggaagtgacctctgctggatatgtctattcaggaagattgctggagtgggtggggtctctgggaggtcccctgagtgtgggaagctgggaccaccagctttctcgcacagggagtggccatcccagcttggagaggttccaggactggttgggaggcacgtttcagatttctatctgttgaatcagcgaagatattggattatgaggaatttgggaattaggaaagtgggtgcaggtgggttgggggtaggtgaaggaagacatgggcgtattgggggagcaggggctgctcagaggtgttccagaagctctgggtgaggaggtgagagggaccggggaatgcagctcggcccagcctccctgcctgaggtcagccatcacgtggtgatggcaagatggaaatgtgctttctgactgctccagccagtgctgccagattcagctccccagggagggcacctgagaggctccaagccaggagatctgttttctcctttgttttgtttttttttgttttgttttgttttattatactttaagttctagggtacatgtgcacaacgtgcaggtttgttacatatgtatacatgtgccatgttggtgtgctgcacccatcaacttgtcatttacattaggtatatctcctaatgctatccctcccccctccccccaccccctgttttctcctttgaatccttcttagaggccgggtgcggtggctcacgcctgtaatcccagcactttgggaggctgcggcaggaggattgcttgagcccaggagttccagaccagcctgggcaacatagtgagacctcgtctctacagataataattttaaaaattatccgggcatagtggcatgcacctatagtcccagctactcaagaggcagaggcaggaggatcacttgagcccaggaggcggaggttgccgtgagccaagatcccaccactgcactccagcctgggcgacagagacccccatgtcaaataataataataataaataaatccttctcagtcccttcctcactgtgtccccctccactgaatttttccacctcctctcccacttcccccactcccgctttccctctccttctctccccactccatctttttctttctctgctgtttctcgtccctccctcctctccatcccacaacactgcctaccctgtccctgccccaccctggtgctcaggatgtgtgaagtgaggggtggtagcccccaagacctcaaccccgaaggttagcctgttgaaaccactttctcccagctgcccccctggcagttggtgctgctgggggaaactgggattgggggccagattttgcctcttttcctgacaaagagagatgaagagttctctcaccaggtgcctgggactggggtgtgggtgtcccagcctatcccagcgcatctgttctgcatcatgattaatagtgctgctttcagccgggcgcggtggctcacacctgtaatcccagcactttgggaggctaaggtgggcagatcacaaggtcaggagttcgagaccagcctggccaacatggtgaaacctcgtctctactaaaaatacaaaaattaaccaggtgtggtggtgggtgcctgtagtcccagctacttgggaggctgaggcaggagaatcacttgaatctgggaagcagaggttgcagtgagccaagatcgtgccactgcactccagcctgggtgacagagcgagactccgtcctaaaaaaaaaggagttttgctctgtcgcccaggctggagtgtagtggcgccatctcggctcaccgcaacctgcgcctcccgggtgcaagcgattctcctgcctcagcctcccaagtagctaggattacaggcgcctaccaccacgcccggccagttcttgtatttttagaagagacggggtttcaccctgttggccaggctcgtctgggactcctgacctcaggtaatccgcccacctcagcctcccaaagtgctgggattgcaggcatgagccaccgtgcccagtcaactccttctcaaaaaaaaaaaaatagtgctgctttctctttcaagtgtcctgatttgggtgatagtaaatgccactctacttataagggatctacctcagaatgctaattgggacatttttgtagcactctactgttggcagcaggtgatgctcacaacagcccgtgagggtggatgacgtccgcttcacagatgacaaaggagcctcatgctcagaccgtgggctgccagagcaggtccatggctgcagccccacatggaccatatttcccccttgtcactctttccaccaagctcccttggaacttcagttattaagctctcttgggtggaatccaagttagaatcacaacatgtgcctcatatggattgtgccagtgaaaaatgacattctatttagaggcagggcagcctggcttagagtcagtttaaaatatgtattatgctgcaacaaatgtaccatgatcctgtaagatgttcacaacaagggaactggatgtggggtatactgtctgtactaacttcacaagttttctgtaaatctaaaactgttccaaaataacaagttcgtttaaaattaactccaggagaccaggtacggtagctaatgcctataatcccagcacttcggaaggctgaggcaggtggattgcttgagcccaggagtttgagacaagcctgggcaacatggtgaaatcctgtctctaaaaaaaatcacaaaaattagccaggtgtggtggcgcattcctgtagtcccagctacttgcggggctgaggtgggagaatcatctgagcccaggagtttgaggctgcagtgagctgtgattgtaccactgcactccaacctgggcaacagagcaagaccctgtctcaaaaaacaaaaatgaaataaagtccaggaaagaagtaggttttaccactcttattttctgaagagaaaactaaatttaatgtgtaaagtgaggacaagttcaccaagttagtgtttgagttgcctaaaatatgtttgctaaaactattcaaagctttcacataaaacatgatcagaagttctatgccaaaacatatgtgtgtgtatatatatatgcactatatatactgtatataaaaatgcaaaatctaaattgccaaccttttagaaattgctctgaaaggaaagcatttcaagataatttgcttacccaaagaatatactttccaagaaagcaagtaatacttaaggtgttcataatcctcatcaaattaattcttgctactgaaagcttacaaggagctgttttgatgtcgggtgtgacaggtttgacttggcagaaggtgtcactttactaacaacattttaaataagtgacagaagacaagaaactacacgttaaatgccagaacaaagagtgtctaagtggatgctaagagttgaaatatggctggatacctgcccaagagagctgaaaagtagatgaaagttggttacctataaactagtgcaccctaatgaattaaaaggtgttgatgagttaacttgttatgccttccagataagacatgcaaatggggcttcttcctccttcactacttccaagggatttaacaaggagaccaatgcaaatgataaggactgtagggctcaagctggggacagattggggaaagggggaccatcatgcccatatagatgtccctgtgccctggcagtcaaggctgctgaaaaataacaaaacccagaagtctgcgtgatgctgcctctccatttgtccaaagccttcttgcggcagtttgcaggcttttgcaaaagctccaggaccaaggagctatgttcatgctggaagcttgttcaggattagctgttctttgtgggatgggtgcagccagggccaggtgtccagggacagtgttttaacaaagggcatgaggtgtctgatctcacagtggaactccacttgcctttttttcatcttctcattctgcttcatgcacagaaccagccccatcctgaaactgactctaaattactcccgccccaggtggagtgcctttctcggagttcaacagagccttcctgtcgcccaagggacaactccactgaatgcccaagccacacccaaaacctaacaagtaaaaaccaaattctgtgctcccccatcctgggccattcctggtttctctactgctgttggtgataccaccatcagcttgtccatcatgaccctggccagttcctcccacaaccctccacagcacccagggacctcacctccattccatccgacacagatctcctcaccacaaaccttggttttgcaacagcagccatgagacctttacaccctccgcccttcatcctgtcccccactgaggccccagagccattccttaaagcagcgcgccacaaactataacccacaagccaattctggtacccagcctgttttgcacagccagtgaactgacaatgatcttttcatacagccagaaaaacaaaacaaaacaaaaaacaacaaaaaaaaaccccaccattctgagcatgtgacttccatgttcaagatgtctcatgttcagaaaggcccctggaaaaggaggaaggggagctgggcacaaagggagaccctctcagctgagctcctcccatccagacattttcctggacttcctatccaatgacttcccttagcttcttatcagccacccctgtctgcccaggaggctggaagatgtggccttttaactgggcacagctctgtcctctatcatatcagggctctgttcccaaggagggtagagagaatggacaccaggtggaccctcagcagtctgtgccacagagggagtgtttgcaatttccagactaaaagtccccatgtgcttgacggggtatgtgactacaacgtgatgcttgacttttcctcatatgaccagagccactttgtccatctggtacaatgtcagctatctgctaggggccctccaggattcccagtcaattccatatctgcatcaccaccattggcactaaataaaataaaatactcaagttcctgctggtgagcatgagcagtgctacactgggcccttcaaccaaggtgacatgataatgactgaaaataatcactgccacttattggggacgtctcatctgccaggcatggtacaaagtgctttaaataagcattcaacaatttcatgctgacagaagccctgtgagccagtggagctactactatgcccattatacaggggagaaaactgaggcagagagaggttaggtaattcgctcagcctcacacaaccaataggtggtggagccaggatttgggccccatctgcctgactctctagaggctctatcttccagtcttccagagttgagtctaagccatgaataggacaattagacagcagaggaaacccattcagccaccatgtgcatgaagagtaaggaatttctgtcatacagaggggagtgaattcactgagctgagagctgaggaaccattgatctgatggctgagacaccactgggaagactggagaggcttttctgggcatgcagtgccaggcacaggaggagctgagggaagatgactaagaggtactggcaaagaattcagaaattctgatggaagctttacatgttaccatcacatccatccatctatccacccatccatccacccatatcttcctccctccacccaatcatgcatacatccagtcatctatacaccacccacccacccatccatccatccatccatcccttcatccatcccatcatccatccaattatacatacatccaatcatatatctgtacataatccattcttccctcggttcatccatccatccattcatccatccatccacccatcccttccttcatccttcctatcatccatccaatcatatatctgtacataatccattcttccctcggttcatccatccatccattcatccatccatccacccatcccttccttcatccttcctatcatccatccaatcatacatatatccaatcatacatctgcacatcaccagctcatccatctatccatttatccatccatccttccttccatccatcattcatccatcatacatacatctaaccatacatctctacatcattcattcttccatcgattcatccaattatccatcattccttcctccatccatcccattatccatttgatcatacatatatcatctatacatcatccattcatccatccatccatccatccacccatatcttcatccaatcaatcatacatacatcgaatcatctacacatcacccatccatccatccatccattcatctatccacccatccatccatccatccatccattcatctatccacccatccatccatccatccatccatccatccatgtaaccatccagtcatatatccaattacacatccatccagttatacattcatacatgcatctaatcattcaattatacatacacacatccatataattctacatccaattatacctccatccaattacacattcatacacccacctaataaattattaattcatatatccatccatataattatacatcaattatacatccatctaatcattcagtaattcacccaccatccagtcatctatccaataatacattcatccaatcatccatccatccatccacccattcatccatccatccgtccgtccacccatcatggtatgagccatgatttaccacgatggtcccctgtggacagcccaggtggggcagaactgaagggaagcccagggctgcccccataaacatttgcctcctttacatggatgagaactagatccacatgtataaatcctcatgatttgaaggtgcttttaccaacattcactcatgggattctcccaggagctctaggaggaggcaggtagagttgaggtcatctcacgcattttacagatgaggaaacggaggccctgagaggcaggtccaaggccacctgaccagaaagaagtggaactgggacttgaacccagccatcttgccccttggtcccatgctctctagcctgtaactcctgcttcctggtggggcatctccaggaggaccctatcggctggccatgggcctgccctggagtcttttgctctgtgtggccatccttcctccctcaggagagtgtgtgctcccagagcacaggctgtatcttctgagcattttgtcccttcccagtacctagcactcagctctgtatacattgggctctcaagaattctcaaccttccagagtgtaaggccttgacctgctcagccctggatactgcatgatgcattgataagcccataaaataaccagggcagattgactcccagtggccaaagtgccacagggaagggacaattcagcccttctaggaggaggaggaggtagttttctcatttctattaaggcaacaaaagctgccttactaaggacattcttggtggagggcgtgactgtcaaccactgtgatcatttgggcctctcttgcccaggcttcccattctgaaaggacagttttattgtaggtacacatggctgccatttcaaatgtaactcacagcttgtccatcagtccttggaggtctttctatgaaaggagcttggtggcgtccaaacaccacccaatgtccacttagaagtaagcaccgtgtctgccctgagctgactccttttccaaggaaggggttggatcgctgagtgtttttccaggtgtctacttgttgttaattaatagcaatgacaaagcagaaggttcatgcgtagctcggctttctggtatttgctgcccgttgaccaatggaagataaacctttgcctcaggtggcaccactagctggttaagaggcactttgtcctttcacccaggagcaaacgcacatcacctgtgtcctcatctgatggccctggtgtggggcacagtcgtgttggcagggagggaggtggggttggtcccctttgtgggtttgttgcgaggccgtgttccagctgtttccacagggagcgattttcagctccacaggacactgctccccagttcctcctgagaacaaaagggggcgctggggagaggccaccgttctgagggctcactgtatgtgttccagaatctcccctgcagacccccactgaggacggatctgaggaaccgggctctgaaacctctgatgctaagagcactccaacagcggaaggtgggccccccttcagacgccccctccatgcctccagcctgtgcttagccgtgctttgagcctccctcctggctgcatctgctgctccccctggctgagagatgtgctcactccttcggtgctttgcaggacagcgtggtgggagctgagccttgcgtcgatgccttgcttgctggtgctgagtgtgggcaccttcatcccgtgtgtgctctggaggcagccacccttggacagtcccgcgcacagctccacaaagccccgctccatacgattgtcctcccacacccccttcaaaagccccctcctctctctttcttcaggggccagtaggtcccagagcagccatttggctgagggaaggggcaggtcagtggacatctgatcttggtttagtatccttcattttgggggctctgggtgtggcctgggcctctggactttggccacggtgtttgttccagcccttctcctaacctgtcctttccagacactcggcatctaggttattagcacctcgcatactttctgacatgctcctcagtcctgattttgaccatcttctcttgcttcccatctgtgtcagtcaagactgcatttggctgtaagaaacagaaaccccaactaactgtggcatttacatgaagaggtttacttttctcacataatcagatgtctagacttggccagcacctcaagggtcattgatgctctcctgtctttattttctgtcatctttagtggttggattgttgcctcatggttacaaagtggctgctgcacttccaggcatcacatctgcctttgaagcaggaacaagttgcaaagtaaagtggccaaaagggccctgaaactaaatgtgtccccttaggaaagcaggagttttcttgcaagtggcaatcttctgcttatgtctcattggccagagctgggtcttacggccaccccttgctgcgagcaaggctgggacattgagcattttgccgtccaacctctttagcagaataaaccaagggggaagaacgttaatagtggcttttgagtcactagttggcagtatctgcccctctatctttccatcctccccatggagtttcaaggttcctttctcagtacttcttcaggctctgcacgttcatttggatcttgtgtcttggggtgaaaaactggcccaagtgtctccccaagcatccacctttggattaatttggaaaatggctgtcaagtgcccgcctcttgcttggtataatgctacagctttagaggacgcagcaggcatgggccttgccgctgaggttcttagcctcatgagaatatccagatcagattctcttggctccttcttagagccagtgatgcaagacacttcctgctcatcttgtcgggacggttttacaagttgcctgccatcctgagaaagtctacaaaacgatgccagacctcatgccagcttcccaagccttgactctcagtgctccctcaacaggattctggaagaatctcccaaacaagtcgcaatcccctctggaccctgtgcaggcatgagactcaagagcattggctcccacccctggtggagggaacactgctggggctgggatcttgcctggttgctccgcctgcacccaagacaaccataattaaaatgtccttcattgaacttggaaagccttcaaagctgacaactccttatgtgtacccggaaaggcctgggagtgtgccagggcattgctcgggagggacgctgatttggaagcatttacctgatgagagactgacagcagctcctggtagccgagctttccctcctgcctctgctgtgaaggtggacccatccaacagtcaaatgcctgactctggacaggagcggacctatttattgccatgcaagggactctgcacttttgaattgtgggtcatgggcttggatttaggggttagagctgggagaagtcttggaagtcacctagagatgacactgccattttgcagatgaggaaaccgtccaatcaaaatggaccaaggacttgcccaaagcctcacagcaaaaccataggcccccgcactaaccccagagtccctgtgctgtcttaagaatcaaatagttgtaagcaatcatctggttttcagtatttcttcttttaaaatgcctggggccatgcccagcagtctgtttcactgcagcgtttacacagggctgccgggctttcctggtggatgagctgggcggttcatgagccagaaccactcagcagcatgtcagtgtgcttcctggggagctggtagcaggggctccgggccctacttcagggctgctttctggcatatggctgatcccctcctcactcctcctccctgcattgctcctgcgcaagaagcaaaggtgaggggctgggtatggctcgtcctggcccctctaaggtggatctcggtggtttctagatgtgacagcacccttagtggatgagggagctcccggcaagcaggctgccgcgcagccccacacggagatcccagaaggaaccacaggtgagggtaagccccagagacccccaggcagtcaaggccctgctgggtgccccagctgacctgtgacagaagtgagggagctttgcgtgtttatcctcctgtggggcaggaacatgggtggattctggctcctgggaatcttgggttgtgagtagctcgatgccttggtgctcagttacctccctggctgcctgccagcctctcagagcatttagggccttctggacttctagatgctcctcatcttgcctcagtcagcgcgtcagttccagagacttctctgcagggttttctggggcaggtggtggcagacccgtgccttcttgacacctgaggtcagtccaccctcctgctcagactgcccagcacagggtcacctcccaaggggtggaccccaagatcacctgagcgcacagagggtgcagatgactggaccacaccttttggtgatcttaatgaggtggtcccagaggagctcagacatgcaatctagcatccagttctgggactctgtctccttttcaaacgtattcatgtagaacaggcatgacgagaatgccttgtcaacatgggtgatggggaatcaatcagacagggcgccgggctcaaggctgcagtcacccaagagtggctcagcccaccaggccctaggaaacgcctgcacagcctggagctcctggagtcatttccttcatgtcttcttcactgcacttacgtaaagatgccagccattggtttggtgatttggagggtgcccagttgcccaacaagaaatgcagaagaggcctagccaggatttcaccagcagtggagagtagagaagatgtggccagaaaagagtttcctttccctcctaaagatggtactccctgcagctactggggaagcctgcagcattctctagggctctgtgtgttgagagcagccccaccctggccccttctgagtgcatttctgctttgtgacttgatccgtgaagtcccctgagatgggcagaggggatgtcctcgaagctggggcagagcctcatccttgaacgtgaaggacgtttgaagactgtggcatgatcacaggatgagatcacagggaacttgagtttctctcctcctctcccttcacagttatttcactgagggaaatccctcccctgcccagaatgaaaactctagccaactcttgacttttccatcactccaaagtagttgaaagtacattagtctccacagtggcaaaacagtgtgcaaaagctaaataattagaacagccagtcccatgtgacagtcaaagcttctaactccattcaaagttgcagccattcccctcgagggctggcagggaggggaggggtaagagaaacaggaaggttcttactgagttggtcctggtgtgagctgcgtcacactccctgcagaggtttcaaggagactctctctctctctgtctccatggggaccttatttgaattcttctactcttaccccagcctgccatctccagctatcctcccctgaagagcccttctgctgcgctggattctggtggccatgtcatctcctcggccccgtgggagtctgaagatctggctgcagcctcacctctgaggtcctgctagttgccacctcttaaacatgatctgaggctcccatgcactctgacctgtgcccacatggggcccacgggaaacacgctggcaagcaaactgtgggtgtgcagacggttctcagggctgcagcacctgtcctttgctctgcccccaaagcaaggccagcccatcttccatcctctagtgttccttggtggggccctgaccacagtccaccaggtccctaaccagaggggacacacaccaggtgtcctcaatgtattgccttgaaacagttgtgctgggactgtgatggggggtggccatgtagccacccccaccacccccaagccactctctccaaggaaatcctcctaaagatccctttacatcctccatgtggtggggaggttctagagttgggtgcatgtgtcttcagctactgacaatgcagaccttagttggcacctcgctctggcctatcctgtttgctgttcttggcgctccagtgaaactccccatgggccatccagttggggtgcagtgtggccacccccttgcaggttcctgccttgctggagagcacagggccctcctggctcttgtaaaacactccccatggtacagagaggccagcagtgatgtgaggcccaacctccctccatggtgttcccaagcagctccctttctggggtcaaggggtggcaaagacagtgcagcgtccaatttctgactcaagccgggcctggctatcgcagctctgcactgtgtgtgacagcaaggcaactcacccagtgccgtggcagtgaccgtgtccgaggaagcctcctcacaccctctgtctcaaggactctggcatttagctggacttgctgtagctctgagcctttctgccattgccatcaccttgtcagaaactcaggccgaatctgcactcagagttgtgcccaggcagttgagccaacacttgctcagcgatattgtcacatgacaaggcactgtcaccactgggcgtcgtgggtagcgcagtgtcggctggatggacccggagggtgtctgtgtcatgctagtgctagtgatgggagccccgtgagcccattgcccgccctcccatgccctcagcagctgcctggggacagccaatggcctgggtgtttctgaggctaccacatggcttccaggaaactcgagaacctttctctcccttgcctacactcttcacacaggcctgtgctggccagcggtggggatccggcattcctatcttaggtgcagaaagtgactgactcattgcaggcctgggagataagactgatggcccagccagcaagatgtatggatttctcagaggcagtggcctctgtcattgtcctcaggaaatgctggtgattctggtggcctgaggtcaatgcatgtcaacgtggccaacttgccttataaactttttttctggacaattgcgtgcactgtcctgtaacagtgtcctgttgtttatgatgcagaaataggtgtttttaaagcctattgattttggtactattaatgtggtcaggaactttctcagtctttcttgtttggggtgagctgtggcttcctaaacaggaacccaagacacccccaaaagctgctcaccagcactgccagcctccctcttaccaagtagcacccgttcaggacattctgcgaaaggcatttgcccagaagttgggaggaaggaaatgtaacattttggggcacctaccatatgccaggcaccaggctaaacgtgttcacacaaattctcttactaaccctcaccatccttctacaagacaaactagtatcttcatcttggggttcaagatgaggaaatggaggctcagagaggttgaatgaatgccggtgcctggatatgaaccccatctgcctgactccgcaacccaggcaaagtctttccttgaacttcccagcagccactgcttagacacagcctccacaaccatggctcagcagcaaattgcttctctgacctcactcagcctgtgtgtccttgttgagtgaggcattcaggaccctggtcccaaagtggagaaagtctttcctactaggtcatagctacacctgcatgtgggtgctgtgccttttgtttagtgaacttttatcaccagcatcctcagcaatgacatttgcagagaagccagagctgaggcaccttggtattcttgggatgtgactttcctgaatgtttaagggaaaatgcccgaaggtacagagagcttggtttctagtaaacaataactgtcttgcttttaccccccttcatttgctgacacatacaccagctgaagaagcaggcattggagacacccccagcctggaagacgaagctgctggtcacgtgacccaaggtcagtgaactggaattgcctgccatgacttgggggttggggggagggacatggggtgggctctgccctgaaaagatcatttggacctgagctctaattcacaagtccaggagattttagggagttggttcttatcaaaggttggctactcagatatagaaagagccctagtggtttttttctaataccatttctgggtaattcctaaggcatttagtgttctgaaagatgctagccttgtccagcctgggagttgagaatgaatgtctaacagaaactctaggccgggcgtggtggctcacgcctctaatcccagcactatgggagacccaggtgggcagatcacctgaggtcaggagtttgagaccagcctggccaacatgtgaaatcctgtctcactacaaataaaaaaattagccgggtgtggtggtaggtgcctataatcccagctactcaggaggctgaggcaggacaatcgctcgaacccaggaggtggacgttgcagtgagccgagatcgcatcattgcactccagcctgggcaacaaaagcaaaactccgtctcaaaaaaaaaaaagaaactcaaatatgtgtgacaggcgattctcactgcaggctgccctgtggctgatccaggagcaaggccttaaccatgtcatccccaagcgattgcttgtaaactttcttctgtgcagccttcaacccttattatgattttcttctcaggaaccaaactgctgtattcaagaaaggcagctttgtgtaatcatttatcataaatatcttaagaaaaatcctagagattcctaattttaggaaatgggagacctatggtactgatataatgtgggctgggcttgttttctgtcatttgctagataaatgaacttgagagcctactgtaaaatgtggaagcttctagattgcagaagggctggaaagacactgttcttttctcccgagtgatgggatctgtccagtatttagagctgcctctgaggccatctgattctaggagactctgcctcgttgaggatattttgaggcctaactacacattcctgcccccagagaggtcacagcctatagcaggctgatgtttctcatgtcacatggcacagaaaggcacattttcgttctcaggctaacaaagagcttcaaaaactattagaagggacagtggctataagagaagaacctcagtcaatgtgtgaaattaactaggaacctggctcctgtttcttttaggtcatgtttttcagcttaggtaaaactagaggctttgataaagcatgacctctagaaatcattgcttttcataaatggaagtgggtttgagttttttctactgattgttagtgcaggtgatgtctacatgcccccagaacatattccatgcaacaaaaaaagcccaggtcaccgtctttgctgggaacttgacttttgtgctcactgaattttaagctttctgacagcagcctggaatcatggagggataaagtacctattagtaagatggaaaaaggtgtttcaggttggagctgcagtctgttgagagtaagctatgggaaggcctgtatacgaggggtggacttttcttctgtaagtgtccagagaccaggcctcctgaagagggcatgggggcttaacttacctggactactgtgtttacaatactcatttatcttgaactcctcctaacccctgagaattgctacatttagtatttgctgagtacttcctagcatcctagggaatcaatagaacattctcccaaccaggctgggtgcggtggctcatgtctgtaatcccagcactttgggaggccaaggtaggcagatcccttgaggccaggagtgcaagactagcctggctgacatggtgaaaccccgtctttactaaaaatacaaaagttagccaggcatggtggtacacacctgtaatcccagctacatgggaggagtaggaggcaggagaattgcttgaacctgggaggtggaggttgctgtgagccgagatcatgccactgcactccagcctgggcgacagagtgagtgagactctgtttaaaaaaaaaaaaaaaaaagaacattctcctaacctggcttcttcctccaggggtgtaattaatcatgtcagtttcctcattgatacacacacacacacactacaatcctgtatccattacttttcaaggtacatttactatttacgtttggggtccttgtctcttttttaatagtgtttcttaaagtcttgtattatatcagagtacagtaacatcccagtcaagagcactctagtaagctctaggaggaaagcgacttccggaaggcagtggagacctgtcctgttggggcagcataggggcagcccctgcctctggtcagttctggcgctcaggctcagggttgcctctgggctgttcttcccagagactgacaaagggctcccataaggcacctgcagagcctgtgagaagctgaagtcaatgttttcctgacaccagttgatctgtgcaggatccattgatttaaccacctgctgtgtggcatgcactgtggtcgatgccaggaacaggaattggaggggcccatgagcatggccagtatcacaggctggaggtgctgctgcgctctgaccgggcctcttggggatgagcccatgtcaaccaccttgcctccgatggggtcgggcccacaggttacctttgtgtgtccatgaccacaccttcctccccgacctcatccaaatctctttcttttccaagcccctgaatccttcagggctgcaggttttgtttaaagcagagctggtgagttgcataggttgttgcgttgggactagatggggtgttcaaagagttgggagttaaaaaacataaagggtatttattaggagaaccaaggagtgtaattctcctgttcttaatatgcggccaggttaatgaatgtcacgtgaatgaaccagaaaaaaatgaagtgtgcccttgatcagctgggttggtgtgcagcaagctgtgtgaccaggggacagcagtggtcctgagggccgtcactgtctgccgtgcagagcccttcctcccacgggggcctacctcacctgtgccaagggcttgtctgtggtcagtgacctggatagatctgaatggggcttctttttcgaggagtcttatggcaggtctctcagtaaagactccattcttgatgatcacacattttggattttccaaatctgtcagagaatgggcttgaggcggggtttgtgggcactagtttcactggtttcatttaccaaaaaggggagcagaagtcaagtatggtggctcatccctgtaatcccagaggcaagagaattgcttgagcccaggagttcgagaccagcctgagcaacataaggagaccccgtctccacaaaaatgaaaaataacattttagtcagacgtggtggcatgcatctgtggtcccagctgcttgggagggtgagatgggagggttgtttgagccctggagttaaagttgcaatgagctgtgattgcaccactgcactctagcctgggtgacagaacgagaccctgtctcaaaaaaaaaaaaaaagaaagaaaaaaaggaaaaaaaaaactcatgcctgtaatcccagcactttggggaccggggtgggcagatcacgaggtcaggagatcaagactatcctagccaacatggtgaaaccccgtttctactaaaaatacaaaaattagccaggtgtggtggcacgtgcctgtaatcccagttactcgggaggctgaggcaggagaatcgcttgaaccagggagtcagaggttgcagtgagctgagatcgtgccactgtactccagcctgggcgacagagtgagactctgtctcaaaccaaaaaaaaggggtggggggcgggggcaggagaacagtgagaggtagggagaggaaaggggattctcgctacacccaaaccagataccatctagaggctagaatctttgggaggctcaaattccctagaaagcaggagaagcttctgtagccctcccgctttcccagtagattaagcccagggcggctccagatgtgtgacatgctctgtgcccaaccagagcccatcataggcagaggaataacacccacaccagaagggccctcggaggtcaccacgtccaagaaccctctttacagatgaggaaactgaggcccagagaggggagagccacctagcgagctggtggcggctagaccaggagagctgtcattccaagcaagcaaaggcaacgagacgagcccagagctgtgctcccatctctttgttagggggcctgggatgccctctcagtgtcattttgtccaggatgatgctccctctcttaagcgattaatgcgcccttgctaaccttttgctatcgctgcctcttcaaaccagaggagttgagagttccgggccggcagaggaaggcgcctgaaaggcccctggccaatgagattagcgcccacgtccagcctggaccctgcggagaggcctctggggtctctgggccgtgcctcggggagaaagagccagaagctcccgtcccgctgaccgcgagccttcctcagcaccgtcccgtttgcccagcgcctcctccaacaggaggccctcaggagccctccctggagtggggacaaaaaggcggggactgggccgagaagggtccggcctttccgaagcccgccaccactgcgtatctccacacagagcctgaaagtggtaaggtggtccaggaaggcttcctccgagagccaggccccccaggtctgagccaccagctcatgtccggcatgcctggggctcccctcctgcctgagggccccagagaggccacacgccaaccttcggggacaggacctgaggacacagagggcggccgccacgcccctgagctgctcaagcaccagcttctaggagacctgcaccaggaggggccgccgctgaagggggcagggggcaaagagaggccggggagcaaggaggaggtggatgaagaccgcgacgtcgatgagtcctccccccaagactcccctccctccaaggcctccccagcccaagatgggcggcctccccagacagccgccagagaagccaccagcatcccaggcttcccagcggagggtgccatccccctccctgtggatttcctctccaaagtttccacagagatcccagcctcagagcccgacgggcccagtgtagggcgggccaaagggcaggatgcccccctggagttcacgtttcacgtggaaatcacacccaacgtgcagaaggagcaggcgcactcggaggagcatttgggaagggctgcatttccaggggcccctggagaggggccagaggcccggggcccctctttgggagaggacacaaaagaggctgaccttccagagccctctgaaaagcagcctgctgctgctccgcgggggaagcccgtcagccgggtccctcaactcaaaggtctgtgtcttgagcttcttcgctccttccctggggacctcccaggcctcccaggctgcgggcactgccactgagcttccaggcctcccgactcctgctgcttctgacgttcctaggacgccactaaatcgacacctgggtgcagctgctccactccctcggcctcctcccgtgctcaggctgtggccgcacgcgcccctcacgcttgcccgccactctgcatgtcaccagcacccccgctccgtgctccccaccttgtttgactctctggccacttgatttgtccacaacggcccatcagcccacaggaggtttggtgggtgccttccaccgacaggatgacgggtgccctcatggtgtctagaactctccaaccctcccatgtaggcataagcagccccactttgcagatgaggaaacggaggctcagagaagtacagtaacttgccgaaggccaatgagtagtaagtgacagagccaggtttgggatccaggtaggttgtctctgaaagacacgcctgtcctgcatcccacaacgcctcccaggaggtgctggagtgtggacgcctaacacagagatgtgcagggcacacacagcaggtgacacacacagcatccagaggtggcccagagctcatgctgtgcctttggcccagtgccctgcccccacccactctgccttgtggcaggaagacaaggagcagacacaagatctccctggtccacatgccaccacctccctctgcagaggacaaggggatcctcatgctggcattggagggggttgagcagggcccaccttgagccctcaggagcacgaccacagcagccctgcagggagggattggtgggaggagagtcccaagtatcagggagaggagagttggtgtcccacaggagacctcagagccacaaggcgagcttgttcataaatttgggacccttagcatttcacagttatttgcagagcccagaaatggatgttactgaagctcacagttgcaagcatctgttaaatttttattagattttacttttagggaaaactttgaaatgctataaagaagcctgtgtttaaaagttaagacagaggctgggggcgatggctcacgcctgtaatctcagcactttgggaggccaaggcaggtggatcatttgaggttaggagttcgagaccagcctggccaacatggtgagaccctgtctctactaaaattacaaaaaattagctgggcgtggtggcgggcacctgtagtcccagctactggggaggctgaagcaggataagtgcttgaacccaggaggcggaggttacagtgagccaagatcacaccactgtaccctaagcctgggcgacagagtgagactctgtctcaaaaaataaaataaaataaagttaagagagaaaaaaatatatcctatatcctttgttaaattccaaaacagtaggggacaaataactgacttgacaggttactacaatatttcctgaaatgatgttttcttgaatactggcctactagaggttcataggtgtgtttggattaaaaaagagttccatggcccagtgactgggggaaaaaaataaaagactaaagtaagttaaacaggcttttctgctgcaggacttgtcagagcctttaatgtactaatggccattgtgaccctctgagaaggtcacagagtgggtttcccaaacttacttgattctacctgctaacatttcctggaggaagtttgggaaatgccgatttagcagattcttttgttgtgccgtggatggtgctggttgatgtgggcaaaacaaagaacacgtgagtcagatccgcctggggctcttactaaagtgcaggttcccaggtgccactttaggcttacagacccagttgtggggtaagcctgggagtcttttagcaggtgattctgccacatagtatagttggaaaacctctgggcatactcattgctggtccctctagaaatccaggtgacaatagccaatgagaagctccaagagacccagttgtccatggggtagagggaatgtgatattgaaaccaaagaagaaaatctatgatcagttttcagcagtgactgtcaagagaaggagaagggtgagttagcgctgatgctggctgacaggtcagcgggttggtttcaccaaggagtgtgatgaaggctgatgttgtctgtgggaatgtatgatggtaactggtttgtagctaatttggggaagcagtgagaattcgtgccctttgaagaccagtaagtggcaagaaacccaccaggcctggctcagggctgggctgggcttggctcgtctcagagcagctggggctggtggccaaagccaccattagtgaggggcaggccctgggggtacaaccagcaactaggggacaaagacaaccctgccagcctctcctattctggaggcgtgtgaccagaaatggagatgggttggtcagcataagatggccaggaaggtggaaatcaggactgctggcaatctagccacatgggcaggggagccgggtggttccaggcagtttccaaggccaagagggtgagcaggcacctcacagggaatcagggccaagcctggctgcagtgtggagacaatgcacccacccccatccttggatcttgcaggaggctgggtcctcactgagctaccaacatccatggccctgaggcttttaaaacacccatccatggagtggggctggtcccagtggggtgaggctgaccctggcagaaacagggcaggagcctgtgggttagggagactgcaccttccttagatagcctccatgccatcatgtccccgtgacagtttctgctgcgtcccctctgcatggtcccaccctcggccagcctgctgccccctcttgccaggttgcgctaatcagtgaccccagtgtgctgtgttgatactaacaatgcgaggcctagcagattcaagggaaaagagaaccaactgggtttccaccagacccaactaaacaaacatggacctatcccagagaaatccagcttcaccacagctggctttctgtgaacagtgaaaatggagtgtgacaagcattcttattttatattttatcagctcgcatggtcagtaaaagcaaagacgggactggaagcgatgacaaaaaagccaaggtaagctgacgatgccacggagctctgcagctggtcaagtttacagagaagctgtgctttatgtctgattcattctcatatataatgtggggagtatttgtcactaaagtacagctgtcatttaaagtgctttgtattttggggcaggcttttaaaaagtccagcatttattagttttgatacttaccccagggaagagcagttggcaggttcatgaagtcatgctcctaattccagctttcttagtgtactttcagtgagaccctgacagtaaatgaaggtgtgtttgaaaaccaaacccaggacagtaaatgaaggtgtgtttgaaaaccagccctaggacagtaaatgaagccatcttctcactgcataaactgcacccagatctttgcccatccttctcagtatttcacttcacccattgtttactgtctcaatgactggggaaatgtctggggaaatgctcccgtaattgcacagtggcgtttttcctggaaaatcccaccatggctctagataagacctatttttcttaaaggtatctaaaatttccagcataaattctgtctgaaacacctgaattttaatcagtactggagcccggagggcatctccagttgccacatagctctgagcattcagtggtgtgttgagggctgctcccggaagtgcctgcagagtcagggctccccagcctcatctagtgaggcagtggaagggcctgtggggatttggagagctggcctgggtctctgaagtgatagtgacagctgcttgtcaatcacggtgcacatttagtgccgggggcagggggcagggaataccagcctcatgcatgcatgcattcatttgttccttccttcattcattcattcagtacacatgggtacaacatccctgccctggagttgcccagagtctagggaggggaaagatctattaccctgggcctcggccagctggggagtgctgctggtggagaggggccgtgtgcagcgagggaaggaggagtcgtcaatacccccaccccagctttgctttcttgtcatcagccccagggccccagcctgtgtccctcctctcccattgctacttcatctcctgggtcctccttaccaagcctgaccacacagagggccttggccgcttccatggggaattggaaagcaataagatagcatcccctagaagcccagtgaagtctgggacaggacccttctctgagctctgacttgctcttggaaacacttcgaggcttagcctccccactttgtttcccaagagtgtgacctgttcccctccaaacacccccttctcctccagggccatgcccacccgtcaaaatcccccacgggcaggacgaactgtgggtgtcagtcaccatctatcctgcatcctggttccagggccccccccagccccgcctccatagggacaggcgtgcagacacccgtccctggctgcttcctcttgtggaatgggttcaaaagtaagcagtgttgtttacactgacaaactgaaaaaaaaagaaaaagagataacattggaggcttggcacagtggctcatgcctgtaatcccagcactttgggaggctaaggtgggaggatgtccccagcccaagagttctagaccagcctgggcaacatagcaagaccccatctcaaaaaaaaaatttaattggccaggcagaggtgggaggatcacttgaacccaaagggtggaggctgcagtgagccgtgatggcaccactgcactccagccagggcaacagagggagaccctgtctctaaaacaaacaaacaaacaaacaaacaaaagagttaacattggccagattaggattcaccagatagtgttaatattagtttgatttgagactttaatcagaaagcacatgtgtggtgggggtgggtgtaacctaagtcaggtagaatctttccaacttggggggggcacactcctgattgtagccatatgagtctgtcagtgtggtggaagagaccatgggttaatgggcaggtaaaaaagcaccttgcctggaattgagtagaaagtaaggcccttcagaccccgtgacacacttggggacattttcttgagtaacatcctaagattcatgtaccttgatgatctccatcaacttactcatgtgaagcacctttaaaccagtcgtctccaaattcaggggcacagtaacatccaacaggctggagaaagaacgtactagaacttccattcctttttcatgtcctcttctaaaagctttgtcagggccaggcgcggtggctcacgcctgtaatcccagcactttgggaggccgagacgggtggatcacgaggtcaggagatcgagaccatcctggctaacacagtgaaaccccatctctactaaaaatacaaaaaaacgagccgggcgtggtggtgggcgcctgtagtcccagctactcgggaggctgaggcaggagaatggcgtgaacccaggaggcagagcttgcagtgagccgagattgcaccactgcagtccagcctgggcgacagagcgagactccgtctcaaaaaagaaaaagaaaaagaaaaagaactgtgattggggaggacggtcactttcctgttcttactgatcagaagggatattaagggtacctgattcaaacagcctggagatcactgctttcaaccattacctgccttatttatttttagttactgtccttttttcagtttgtttccctcctccatgtgctgacttttattttgattttatttatgtttatgtttaagacatccacacgttcctctgctaaaaccttgaaaaataggccttgccttagccccaaacaccccactcctggtagctcagaccctctgatccaaccctccagccctgctgtgtgcccagagccaccttcctctcctaaacacgtctcttctgtcacttcccgaactggcagttctggagcaaaggagatgaaactcaaggtaaggaaaccacctttgaaaagaaccaggctgctctgctgtggtttgcaaatgtggggtttgtttatttgttttttagcctcaaagacctttcttcaaatgagttctggcatagaagcaccgtgtaaaatagttagaattctgggcaaaggggaaaagagagctgggggccatccctctcagcaccccacaggctctcatagcagcagctcctaagacacctggtgggaccttggtttcgaaatcgctactctaaggctgggcacggtggctcacacctgtaatcccagctctttaggaggccgaggagggtggatcacctgagatcaggagttcgagaccagcctggctaacatggcaaaaccctgtctctactaaaaatacaaaaattagccgggcgtggtgttatgcgtggtggtaatcgcagctactcgggaggctgaggcacaaggattgcttgaaccccagaggcagaggttgtagttagctccagcttgggcgacagagcaagaccctgtcgcaaaaattgtttaaaaaacaaacccaaaattgctactctcattgggttcctttgcccattcctgattttggcaagagaaatgcttccagattgccctgatctgggtaggacagcatcacgccatagcaacactgccccgtgagctcactgccccctcaactagcttgtggtccttggttaatgtcagtttcttttttgagtttgtgttatgtctaagggtcatctgctgggtaacggaacccagggactgccctagtccctagactgtgccatgcccgactctgccagctttgtcagtgatgctggtgctcgcctcctcgggtgctcgcctggtctgagcacacccaaggagttcttgaggccttagggttgtttgcgagagaatgaaagaacacgacctagctctctttagcatccttggtcaggttcaacactgcccccaggggcctctggtggagccaaccaccatcagccaaataaatccataattagagtcagaaaatggatgtctgcatatgtgtagtgcactaatgtcctgccgatgattgacatggagtggagagtgacctgatcattgctgtgagctctgctggccttggcacaactcatgctgataactaatgcacacagttcctctgggaggaaatgtcctcagggaacttggagtttgggtggggatgtgggtttgtgtgcccagcaagcccttgtggttgtagcagacactagtggcatctaggaggcaaagggtcaccccagtcttagccacgttttgagtcaaggtggcggagtggggctggtgttgactcttggtggcagtaacttttcccaatggtgaaaaacccctctatcatgtttcatttacagggggctgatggtaaaacgaagatcgccacaccgcggggagcagcccctccaggccagaagggccaggccaacgccaccaggattccagcaaaaaccccgcccgctccaaagacaccacccagctctggtaagaagaacgttctcttgaatcttagaggaagctgaagctctcagaggtacagccttcattttaggaggccttaggccactgagaatgaataacccctggcagctggtcagcagcttgcagtttactaagcactggagtcttcattgccttctcagtccttttgatttctgaggcaaatgttgaatccctacctttttttttttttttcttttgagacagagtttcgcttttgttatccaggccggagtgcagtggtgtgatctcagctcactgcatcctccacctcccaggttcaagcgattctcctacctcagcctccctagtagctgggattacaggcacctgccactatgcccggctaattttttgtatttttagtagagacagggtttcaccatgttggccaggctggtctcgaacgcctgacctcaggtgatccacctgcctcggcctcccaaagtgctgggattacaggcatgagccaccactcccagcctgaatcctcactttttatcaatgaagaaattgaggctgattctgcagcatgataaaaaaaaatacagaaaaaggaaaaaaaagaaagaaatcgagcctctgagagtttgcttgactgagtctaaccagctcattttaaacccgaggaaaatgcagtcacatgactactaagtggcagctctcggagcctctctggccccaagtccagggttccatagaggcagccccagcatggcatgttttcagtccccaaatgagactctggagacaaatgtctctggagacagagcagcagcctggataagtcacaatgggtgacgtcactcagggctcaacccctgggcagcttaacttgctagggacgttaggagtctgctgcaaaacctgagggtcttagctgagcagtcacaggctgggcccgttgccctgggctcctgtgagtaaaacccagtcaattttgagtacccagtaaggcatccattgagttattttgcagccaggagtgctattaagaacagtcgcggctgggcgtggtggctcatgcctgtaatcccagcactttgggaggccaaggtgggcggatcacctgaggtcaggagttcgagaccagcttggccaacatggcaaaaccccgtctctaataaaaatacaaaataattagctgggcgtggtggcgggcgcctgtaatcccagcttctcaggagggtgaggaaggagaatcacttgaacccaggaggcagaggttgcagtgagctgagatcgcaccattgcactccagcctggatgacaaaagtgagattccttctcaaaaaaaaaaaaaaaaaaacagtcgtcctctttggggattagggacagcctgcctgcctgcccgagcacttctctcttccattgccccagtgaagtattccaggcccctgggtttagactctgcaccatgtaggggtgtctgacctgcacttgctccttggtggcacgggcagcctatggcacttgctgcgggctgtgaccaaagcctggcctggatcttggatcttggtgactctgcttctccctggcctgagggagctgcccagagcctgcccaccacctgctgcgtgtctttgcggtggcatttctcgcacacatgccgtgcggtggcacccccaaggatggccattcactaaggcccattgtttttgtcttttcgcttcgtgttttctggcctggtgtttttctcatatacatgtgatccagggataattcccagaattttgacaggattttaagtagcgtttggatcctgctgtttttttttcacttaacatcgggccagttgactcacactctgttttttgttgttgtttttttgagacggagtctcactgtgtcacccaggctgaagtgcagtggcacaatcttggcatactgcaacctctgcttcccaaattcaagcagttttcctgcctcagcctcctgagtagctgggactacaggcacaggccaccacgccctgctaatttttgtatttttagtaaagacagggtttcaccattttggccagcctagtctcgaactcctgacctcaagtgatccgcccacctcggcctcccaaagtgctgggattacaggggactcacactttgtaacaacctgaaacaacgtgatgcatttccctttgggtcttacctgctcttcggtggctgcctgcaggtggagagaccctcccccttgggcccctcgaccttgtttcagaatggggcccctgctgggccagctgtgggtgcctgccacgtgaaggactcattaaggccctgtttaagcctgatgataataaggctttcgtggatttttctctttaagcgactaagcaagtccagagaagaccaccccctgcagggcccagatctgagagaggtactcgggagcctacttcgctgggagcagcctccctttgcgtgtgtggccattcactggcttgtgtttctagagccgggaggacccttttctgcaatgcagggttcacacagggttcgcagcctgaagatggagcagtccgaattctcttccctgtgcagtttgcgcagctgtgtttgtctgatgggctttctaatcctgtgtgctctccttgacttcagggacaatggcattacaggcatgagccaccatgcctggctgtctccctatgtttcagatgaagacataggcttaaggaggtcaggtgacttgcccacgaccactctgtaaataagaggcatgaaaagtatttggagccaccaccaccaagcccactggtcaccctgggtctctgaagtcagggaggcaggaggatgggaggtctgaggaggcagagaggctgagcctggaggccctggaggccgaggccccatctgttgtttccttatgtggaaaataagaggcttcatttgtcctattgccacagagcgtactacttcaggaacatccaagacatggaaatccgcagggcacggtggctcacgtctataatcccggcactttgggaggttgaggtgggagaatcgcttgaggccagaagttcaagaccagcctgagcaacatagtcagaccccgtctctataaaaaacattatttttaaaaaagacatggaagtcaaattctaaaaactggtgctggctgggtgcggtggctcatgcctataatcccagcactttgggaggccgaggcgggtggatcacctgaggtcaggagttcaagaccagcctggccaacatggtaaaacctctactaaagaaatctttactgaaaatacaaaaatccagtctctactaaaataagtctctactaaaaatacaaaaattagccaggcgtggtgctgcacacctgtaatatcagctactcgggaggctgaggcaggagactcgcttgatcccatgcagcggaggttgcagtgagccgagatcacgccattgcactccagcctgggcatcagaataagactccgtctcaaaaaaaaaaccacaaaaaaacaaaacaacaacaaaagaaaactagtgcttattcgtcactggccaagctgcccattggctacatgggtgcttcaaagagctgcccttctccaggtctggccagcaggtatgtgttacagcaaatgcctggggcagcggcaggggcattgctgcgggaagcttctggacttgcaggaaagctaagttctcagactgcaggggagctaagcacacctcggcacagggtgaggcctgcggttctcagacttcagtctttgtggagcttgagaaaaatgaggctttgcaggtcccacccctagagattctgctctatccactcttgaaggggatcgagaaatttgcattttgcaactcccactttcctccttgaaagctccggagattctgacgcagggttccgtgggccacactttggaaaatacagacccatgagatagaataccagactgttgaagtgtaacgggggcctgggaagtgcagtaacagaagcaagtttgagggtaaaggacacccagaggagggagggacagcatctgcatggagaggagaagagaccccccagcagcttccagggtgttggaagggtgcgctagtaactgctatgcatggcaggtggggaactgtacgtcagggcacagcagcatgaagcggtatggctcgtgtggacagctagggacaggcaggcgtggagcaggcatcctgttctgaaggccaaatcccacagaggagccagggtgctggcaggagccctgaactagccgaacagctgaacagctgaacattcaccctgtggggaaagggtcagaagcgtccaggcttgagggcacagctgggtctcgtcactgcatcacccttatttaggataaaggccctgaagaattgtattagaggttggcaaagcatatctaccacctcctggagccacgctggccgcagggattataattatttccattttcaaattaaggcctctgagctcagagaggggaagttacttgtctgaggccacacagcttgttggagcccatctcttgacccaaagactgtggagccgagttggccacctctctgggagcgggtattggatggtggttgatggttttccattgctttcctgggaaaggggtgtctctgtccctaagcaaaaaggcagggaggaagagatgcttccccagggcagccgtctgctgtagctgcgcttccaacctggcttccacctgcctaacccagtggtgagcctgggaatggacccacgggacaggcagcccccagggccttttctgaccccacccactcgagtcctggcttcactcccttccttccttcccaggtgaacctccaaaatcaggggatcgcagcggctacagcagccccggctccccaggcactcccggcagccgctcccgcaccccgtcccttccaaccccacccacccgggagcccaagaaggtggcagtggtccgtactccacccaagtcgccgtcttccgccaagagccgcctgcagacagcccccgtgcccatgccagacctgaagaatgtcaagtccaagatcggctccactgagaacctgaagcaccagccgggaggcgggaaggtgagagtggctggctgcgcgtggaggtgtggggggctgcgcctggaggggtagggctgtgcctggaagggtagggctgcgcctggaggtgcgcggttgagcgtggagtcgtgggactgtgcatggaggtgtggggctccccgcacctgagcacccccgcataacaccccagtcccctctggaccctcttcaaggaagttcagttctttattgggctctccactacactgtgagtgccctcctcaggcgagagaacgttctggctcttctcttgccccttcagcccctgttaatcggacagagatggcagggctgtgtctccacggccggaggctctcatagtcagggcacccacagcggttccccacctgccttctgggcagaatacactgccacccataggtcagcatctccactcgtgggccatctgcttaggttgggttcctctggattctggggagattgggggttctgttttgatcagctgattcttctgggagcaagtgggtgctcgcgagctctccagcttcctaaaggtggagaagcacagacttcgggggcctggcctggatccctttccccattcctgtccctgtgcccctcgtctgggtgcgttagggctgacatacaaagcaccacagtgaaagaacagcagtatgcctcctcactagccaggtgtgggcgggtgggtttcttccaaggcctctctgtggccgtgggtagccacctctgtcctgcaccgctgcagtcttccctctgtgtgtgctcctggtagctctgcgcatgctcatcttcttataagaacaccatggcagctgggcgtagtggctcacgcctataatcccagcactttgggaggctgaggcaggcagatcacgaggtcaggagttcgagaccaacctgaccaacagggtgaaacctcgtctctactaaaaatacaaaaatacctgggcgtggtggtggtgcgcgcctataatcccagctactcaggaggctgaggcaggagaatcgcttgaacccaggaggcagaggttgcagtgagccgagatagtgccactgcactccagtttgagcaacagagcgagactctgtctcaaaacaaaataaaacaaaccaaaaaaacccaccatggcttagggcccagcctgatgacctcatttttcacttagtcacctctctaaaggccctgtctccaaatagagtcacattctaaggtacgggggtgttggggaggggggttagggcttcaacatgtgaatttgcggggaccacaattcagcccaggaccccgctcccgccacccagcactggggagctggggaagggtgaagaggaggctgggggtgagaaggaccacagctcactctgaggctgcagatgtgctgggccttctgggcactgggcctcggggagctagggggctttctggaaccctgggcctgcgtgtcagcttgcctcccccacgcaggcgctctccacaccattgaagttcttatcacttgggtctgagcctggggcatttggacggagggtggccaccagtgcacatgggcaccttgcctcaaaccctgccacctccccccacccaggatcccccctgcccccgaacaagcttgtgagtgcagtgtcacatcccatcgggatggaaatggacggtcgggttaaaagggacgcatgtgtagaccctgcctctgtgcatcaggcctcttttgagagtccctgcgtgccaggcggtgcacagaggtggagaagactcggctgtgccccagagcacctcctctcatcgaggaaaggacagacagtggctcccctgtggctgtggggacaagggcagagctccctggaacacaggagggagggaaggaagagaacatctcagaatctccctcctgatggcaaacgatccgggttaaattaaggtccggccttttcctgctcaggcatgtggagcttgtagtggaagaggctctctggaccctcatccaccacagtggcctggttagagaccttggggaaataactcacaggtgacccagggcctctgtcctgtaccgcagctgagggaaactgtcctgcgcttccactggggacaatgcgctccctcgtctccagactttccagtcctcattcggttctcgaaagtcgcctccagaagccccatcttgggaccaccgtgactttcattctccagggtgcctggccttggtgctgcccaagaccccagaggggccctcactggcctttcctgccttttctcccattgcccacccatgcacccccatcctgctccagcacccagactgccatccaggatctcctcaagtcacataacaagcagcacccacaaggtgctcccttccccctagcctgaatctgctgctccccgtctggggttccccgcccatgcacctctgggggcccctgggttctgccataccctgccctgtgtcccatggtggggaatgtccttctctccttatctcttcccttcccttaaatccaagttcagttgccatctcctccaggaagtcttcctggattcccctctctcttcttaaagcccctgtaaactctgaccacactgagcatgtgtctgctgctccctagtctgggccatgagtgagggtggaggccaagtctcatgcatttttgcagcccccacaagactgtgcaggtggccggccctcattgaatgcggggttaatttaactcagcctctgtgtgagtggatgattcaggttgccagagacagaaccctcagcttagcatgggaagtagcttccctgttgaccctgagttcatctgaggttggcttggaaggtgtgggcaccatttggcccagttcttacagctctgaagagagcagcaggaatggggctgagcagggaagacaactttccattgaaggcccctttcagggccagaactgtccctcccaccctgcagctgccctgcctctgcccatgaggggtgagagtcaggcgacctcatgccaagtgtagaaaggggcagacgggagccccaggttatgacgtcaccatgctgggtggaggcagcacgtccaaatctactaaagggttaaaggagaaagggtgacttgacttttcttgagatattttgggggacgaagtgtggaaaagtggcagaggacacagtcacagcctcccttaaatgccaggaaagcctagaaaaattgtctgaaactaaacctcagccataacaaagaccaacacatgaatctccaggaaaaaagaaaaagaaaaatgtcatacagggtccatgcacaagagcctttaaaatgacccgctgaagggtgtcaggcctcctcctcctggactggcctgaaggctccacgagcttttgctgagacctttgggtccctgtggcctcatgtagtacccagtatgcagtaagtgctcaataaatgtttggctacaaaagaggcaaagctggcggagtctgaagaatccctcaaccgtgccggaacagatgctaacaccaaagggaaaagagcaggagccaagtcacgtttgggaacctgcagaggctgaaaactgccgcagattgctgcaaatcattgggggaaaaacggaaaacgtctgttttcccctttgtgcttttctctgttttcttctttgtgcttttctctgttttcaggatttgctacagtgaacatagattgctttggggccccaaatggaattattttgaaaggaaaatgcagataatcaggtggccgcactggagcaccagctgggtaggggtagagattgcaggcaaggaggaggagctgggtggggtgccaggcaggaagagcccgtaggccccgccgatcttgtgggagtcgtgggtggcagtgttccctccagactgtaaaagggagcacctggcgggaagagggaattcttttaaacatcattccagtgcccgagcctcctggacctgttgtcatcttgaggtgggcctcccctgggtgactctagtgtgcagcctggctgagactcagtggccctgggttcttactgctgacacctaccctcaacctcaaccactgcggcctcctgtgcaccctgatccagtggctcattttccactttcagtcccagctctatccctatttgcagtttccaagtgcctggtcctcagtcagctcagacccagccaggccagcccctggttcccacatcccctttgccaagctcatccccgccctgtttggcctgcgggagtgggagtgtgtccagacacagagacaaaggaccagcttttaaaacattttgttggggccaggtgtggtggctcacacctaatcccaacacctggggaggccaaggcagaaggatcacttgagtccaggagttcaagaccagcctgggcaacatagggagaccctgtctctacaattttttttttaattagctgggcctgttggcactctcctgtagttccagctactctagaggctgaggtgggaggactgcttgagcctgggaggtcagggctgcaatgagccatgttcacaccactgaacgccagcctgggcgagaccctgtatcaaaaaagtaaagtaaaatgaatcctgtacgttatattaaggtgccccaaattgtacttagaaggatttcatagttttaaatacttttgttatttaaaaaattaaatgactgcagcatataaattaggttcttaatggaggggaaaaagagtacaagaaaagaaataagaatctagaaacaaagataagagcagaaataaaccagaaaacacaaccttgcactcctaacttaaaaaaaaaaatgaagaaaacacaaccagtaaaacaacatataacagcattaagagctggctcctggctgggcgcggtggcgcatgcctgtaatcccaacactttgggaggccgatgctggaggatcacttgagaccaggagttcaaggttgcagtgagctatgatcataccactacaccctagcctgggcaacacagtgagactgagactctattaaaaaaaaaatgctggttccttccttatttcattcctttattcattcattcagacaacatttatggggcacttctgagcaccaggctctgtgctaagagcttttgcccccagggtccaggccaggggacaggggcaggtgagcagagaaacagggccagtcacagcagcaggaggaatgtaggatggagagcttggccaggcaaggacatgcagggggagcagcctgcacaagtcagcaagccagagaagacaggcagacccttgtttgggacctgttcagtggcctttgaaaggacagcccccacccggagtgctgggtgcaggagctgaaggaggatagtggaacactgcaacgtggagctcttcagagcaaaagcaaaataaacaactggaggcagctggggcagcagagggtgtgtgttcagcactaaggggtgtgaagcttgagcgctaggagagttcacactggcagaagagaggttggggcagctgcaagcctctggacatcgcccgacaggacagagggtggtggacggtggccctgaagagaggctcagttcagctggcagtggccgtgggagtgctgaagcaggcaggctgtcggcatctgctggggacggttaagcaggggtgagggcccagcctcagcagcccttcttggggggtcgctgggaaacatagaggagaactgaagaagcagggagtcccagggtccatgcagggcgagagagaagttgctcatgtggggcccaggctgcaggatcaggagaactggggaccctgtgactgccagcggggagaagggggtgtgcaggatcatgcccagggaagggcccaggggcccaagcatgggggggcctggttggctctgagaagatggagctaaagtcactttctcggaggatgtccaggccaatagttgggatgtgaagacgtgaagcagcacagagcctggaagcccaggatggacagaaacctacctgagcagtggggctttgaaagccttggggcggggggtgcaatattcaagatggccacaagatggcaatagaatgctgtaactttcttggttctgggccgcagcctgggtggctgcttccttccctgtgtgtattgatttgtttctcttttttgagacagagtcttgctgggttgcccaggctggagtgcagtggtgcgatcatagctcactgcagccttgaagtcctgagctcaagagatccttccacctcagcctcctgagtagttgggaccacaggcttgcaccacagtgcccaactaatttcttatattttttgtagagatggggtttcactgtgtcgcccaggatggtcttgaactcctgggctcaagtgatcctcctgcctcagcctcgcaaattgctgggattacaggtgtgagccaccatgcccgaccttctctttttaagggcgtgtgtgtgtgtgtgtgtgtgtgggcgcactctcgtcttcaccttcccccagccttgctctgtctctacccagtcacctctgcccatctctccgatctgtttctctctccttttacccctctttcctccctcctcatacaccactgaccattatagagaactgagtattctaaaaatacattttatttatttattttgagacagagtctcactctgtcacccaggctggagtgcagtggtgcaatctcggctcactgcaacctccgcctcccaggttgaagcaactctcctgcctcagcctccctagtagctgggattacaagcacacaccaccatgcctagcaaatttttatatttttagtagaggaggagtgtcaccatgtttgccaagctggtctcaaactcctggcctcaggtgatctgcctaccttggtctcccaaagtgctgggattacaggtgtgagccaccacgcctgcccttaaaaatacattatatttaatagcaaagccccagttgtcactttaaaaagcatctatgtagaacatttatgtggaataaatacagtgaatttgtacgtggaatcgtttgcctctcctcaatcagggccagggatgcaggtgagcttgggctgagatgtcagaccccacagtaagtggggggcagagccaggctgggaccctcctctaggacagctctgtaactctgagaccctccaggcatcttttcctgtacctcagtgcttctgaaaaatctgtgtgaatcaaatcattttaaaggagcttgggttcatcactgtttaaaggacagtgtaaataattctgaaggtgactctaccctgttatttgatctcttctttggccagctgacttaacaggacatagacaggttttcctgtgtcagttcctaagctgatcaccttggacttgaagaggaggcttgtgtgggcatccagtgcccaccccgggttaaactcccagcagagtattgcactgggcttgctgagcctggtgaggcaaagcacagcacagcgagcaccaggcagtgctggagacaggccaagtctgggccagcctgggagccaactgtgaggcacggacggggctgtggggctgtggggctgcaggcttggggccagggagggagggctgggctctttggaacagccttgagagaactgaacccaaacaaaaccagatcaaggtctagtgagagcttagggctgctttgggtgctccaggaaattgattaaaccaagtggacacacacccccagccccacctcaccacagcctctccttcagggtcaaactctgaccacagacatttctcccctgactaggagttccctggatcaaaattgggagcttgcaacacatcgttctctcccttgatggtttttgtcagtgtctatccagagctgaagtgtaatatatatgttactgtagctgagaaattaaatttcaggattctgatttcataatgacaaccattcctcttttctctcccttctgtaaatctaagattctataaacggtgttgacttaatgtgacaattggcagtagttcaggtctgctttgtaaatacccttgtgtctattgtaaaatctcacaaaggcttgttgccttttttgtggggttagaacaagaaaaagccacatggaaaaaaaatttcttttttgtttttttgtttgcttgtttttttgagacagagtttcactctgtcgcccaggctggagtgcagtggtgcgatctccgcccactgcaagctccacctcccgggttcatgctattctcctgtctcagcctcccaagtagctgggactgcaggtgcccgccaccacacctggctaatttttttgtatttttagtagagacggggtttcaccgtgttagccaggatggtctcaatctcctgacctcgtcatctgcctgcctcggcctcccaaagtgctgagattacaggcgtgagccaccgtgcccggccagaaaaaaacatttctaagtatgtggcagatactgaattattgcttaatgtcctttgattcatttgtttaatttctttaatggattagtacagaaaacaaagttctcttccttgaaaaactggtaagttttctttgtcagataaggagagttaaataacccatgacatttccctttttgcctcggcttccaggaagctcaaagttaaatgtaatgatcactcttgtaattatcagtgttgatgcccttcccttcttctaatgttactctttacattttcctgctttattattgtgtgtgttttctaattctaagctgttcccactcctttctgaaagcaggcaaatcttctaagccttatccactgaaaagttatgaataaaaaatgatcgtcaagcctacaggtgctgaggctactccagaggctgaggccagaggaccacttgagcccaggaatttgagacctgggctgggcagcatagcaagactctatctccattaaaactatttttttttatttaaaaaataatccgcaaagaaggagtttatgtgggattccttaaaatcggagggtggcatgaattgattcaaagacttgtgcagagggcgacagtgactccttgagaagcagtgtgagaaagcctgtcccacctccttccgcagctccagcctgggctgaggcactgtcacagtgtctccttgctggcaggagagaatttcaacattcaccaaaaagtagtattgtttttattaggtttatgaggctgtagccttgaggacagcccaggacaactttgttgtcacatagatagcctgtggctacaaactctgagatctagattcttctgcggctgcttctgacctgagaaagttgcggaacctcagcgagcctcacatggcctccttgtccttaacgtggggacggtgggcaagaaaggtgatgtggcactagagatttatccatctctaaaggaggagtggattgtacattgaaacaccagagaaggaattacaaaggaagaatttgagtatctaaaaatgtaggtcaggcgctcctgtgttgattgcagggctattcacaatagccaagatttggaagcaacccaagtgtccatcaacagacaaatggataaagaaaatgtggtgcatatacacaatggaatactattcagccatgaaaaagaatgagaatctgtcatttgaaacaacatggatggaactggaggacattatgttaagtgaaataagccagacagaaggacagacttcacatgttctcacacatttgtgggagctaaaaattaaactcatggagatagagagtagaaggatggttaccagaggctgaggagggtggaggggagcagggagaaagtagggatggttaatgggtacaaaaacgtagttagcatgcatagatctagtattggatagcacagcagggtgacgacagccaacagtaatttatagtacatttaaaaacaactaaaagagtgtaactggactggctaacatggtgaaaccccgtctctactaaaaatacaaaaattagctgggcacggtggctcacgcctgtaatcccagcactttgggaggccgaggcgggccgatcacgaggtcaggagatcgagaccatcctagctaacatggtgaaaccccgtctctactacaaatacaaaaaaaagaaaaaattagccgggcatggtggtgggcgcctgtagtcccagctactcgggaggctgaggcaggagaatggcgtgaacccgggaggcggagcttgcagtgagccgagatcgcgccactgcactccagcctgggcgacaaggcaagattctatctcaaaaaaataaaaataaaataaaataaaataataaaataaaataaaataaaataaaataaaataaataaaataaaatgtataattggaatgtttataacacaagaaatgataaatgcttgaggtgatagataccccattcaccgtgatgtgattattgcacaatgtatgtctgtatctaaatatctcatgtaccccacaagtatatacacctactatgtacccatataaatttaaaattaaaaaattataaaacaaaaataaataagtaaattaaaatgtaggctggacaccgtggttcacgcctgtaatcccagtgctttgtgaggctgaggtgagagaatcacttgagcccaggagtttgagaccggcctgggtgacatagcgagaccccatcatcacaaagaatttttaaaaattagctgggcgtggtagcacataccggtagttccagctacttgggagaccgaggcaggaggattgcttgagcccaggagtttaaggctgcagtgagctacgatggcgccactgcattccagcctgggtgacagagtgagagcttgtctctattttaaaaataataaaaagaataaataaaaataaattaaaatgtaaatatgtgcatgttagaaaaaatacacccatcagcaaaaagggggtaaaggagcgatttcagtcataattggagagatgcagaataagccagcaatgcagtttcttttattttggtcaaaaaaaataagcaaaacaatgttgtaaacacccagtgctggcagcaatgtggtgaggctggctctctcaccagggctcacagggaaaactcatgcaacccttttagaaagccatgtggagagttgtaccgagaggttttagaatatttataactttgacccagaaattctattctaggactctgtgttatgaaaataacccatcatatggaaaaagctcctttcagaaagaggttcatgggaggctgtttgtattttttttttctttgcatcaaatccagctcctgcaggactgtttgtattattgaagtacaaagtggaatcaatacaaatgttggatagcaggggaacaatattcacaaaatggaatgggacatagtattaaacatagtgcttctgatgaccgtagaccatagacaatgcttaggatatgatatcacttcttttgttgttttttgtattttgagacgaagtctcattctgtcacccaggctggagttcagtggcgccatctcagctcactgcaacctccatctcccgggttcaagctattctccttcctcaacctcccgagtagctgggttgcgcaccaccatgcctggctaacttttgtatttttagtacagacggggtttcaccacgttggccaggctgctcttgaactcctgacgtcaggtgatccaccagccttgacctcccaaagtgctaggattacaggagccactgtacccagcctaggatatgatatcacttcttagagcaagatacaaaattgcatgtgcacaataattctaccaagtataggtatacaggggtagttatatataaatgagacttcaaggaaatacaacaaaatgcaatcgtgattgtgttagggtggtaagaaaacggtttttgctttgatgagctctgttttttaaaatcgttatattttctaataaaaatacatagtcttttgaaggaacataaaagattatgaagaaatgagttagatattgattcctattgaagattcagacaagtaaaattaaggggaaaaaaaacgggatgaaccagaagtcaggctggagttccaaccccagatccgacagcccaggctgatggggcctccagggcagtggtttccacccagcattctcaaaagagccactgaggtctcagtgccattttcaagatttcggaagcggcctgggcacggctggtccttcactgggatcaccacttggcaattatttacacctgagacgaatgaaaaccagagtgctgagattacaggcatggtggcttacgcttgtaatcggctttgggaagccgaggtgggctgattgcttgagcccaggagtttcaaactatcctggacaacatagcatgacctcgtctctacaaaaaatacaaaaaatttgccaggtgtggtggcatgtgcctgtggtcccagctacttgggaggctgaagtaggagaatcccctgagccctgggaagtcgaggctgcactgagccgtgatggtgtcactgcactccagcctgggtgacaaagtgagaccctatctcacaaagaaaaaaaacaaaacaaaaaacccaaagcacactgtttccactgtttccagagttcctgagaggaaaggtcaccgggtgaggaagacgttctcactgatctggcagagaaaatgtccagtttttccaactccctaaaccatggttttctatttcatagttcttaggcaaattggtaaaaatcatttctcatcaaaacgctgatattttcacacctccctggtgtctgcagaaagaaccttccagaaatgcagtcgtgggagacccatccaggccacccctgcttatggaagagctgagaaaaagccccacgggagcatttgctcagcttccgttacgcacctagtggcattgtgggtgggagagggctggtgggtggatggaaggagaaggcacagcccccccttgcagggacagagccctcgtacagaagggacaccccacatttgtcttccccacaaagcggcctgtgtcctgcctacggggtcagggcttctcaaacctggctgtgtgtcagaatcaccaggggaacttttcaaaactagagagactgaagccagactcctagattctaattctaggtcagggctaggggctgagattgtaaaaatccacaggtgattctgatgcccggcaggcttgagaacagccgcagggagttctctgggaatgtgccggtgggtctagccaggtgtgagtggagatgccggggaacttcctattactcactcgtcagtgtggccgaacacatttttcacttgacctcaggctggtgaacgctcccctctggggttcaggcctcacgatgccatccttttgtgaagtgaggacctgcaatcccagcttcgtaaagcccgctggaaatcactcacacttctgggatgccttcagagcagccctctatcccttcagctcccctgggatgtgactcgacctcccgtcactccccagactgcctctgccaagtccgaaagtggaggcatccttgcgagcaagtaggcgggtccagggtggcgcatgtcactcatcgaaagtggaggcgtccttgcgagcaagcaggcgggtccagggtggcgtgtcactcatccttttttctggctaccaaaggtgcagataattaataagaagctggatcttagcaacgtccagtccaagtgtggctcaaaggataatatcaaacacgtcccgggaggcggcagtgtgagtaccttcacacgtcccatgcgccgtgctgtggcttgaattattaggaagtggtgtgagtgcgtacacttgcgagacactgcatagaataaatccttcttgggctctcaggatctggctgcgacctctgggtgaatgtagcccggctccccacattcccccacacggtccactgttcccagaagccccttcctcatattctaggagggggtgtcccagcatttctgggtcccccagcctgcgcaggctgtgtggacagaatagggcagatgacggaccctctctccggaccctgcctgggaagctgagaatacccatcaaagtctccttccactcatgcccagccctgtccccaggagccccatagcccattggaagttgggctgaaggtggtggcacctgagactgggctgccgcctcctcccccgacacctgggcaggttgacgttgagtggctccactgtggacaggtgacccgtttgttctgatgagcggacaccaaggtcttactgtcctgctcagctgctgctcctacacgttcaaggcaggagccgattcctaagcctccagcttatgcttagcctgcgccaccctctggcagagactccagatgcaaagagccaaaccaaagtgcgacaggtccctctgcccagcgttgaggtgtggcagagaaatgctgcttttggcccttttagatttggctgcctcttgccaggagtggtggctcgtgcctgtaattccagcactttgggagactaaggcgggaggttcgcttgagcccaggagttcaagaccagcctgggcaacaatgagacccctgtgtctacaaaaagaattaaaattagccaggtgtggtggcacgcacctgtagtcccagctacttgggaggctgaggtgggaggattgcctgagtccgggaggcggaagttgcaaggagccatgatcgcgccactgcacttcaacctaggcaacagagtgagactttgtctcaaaaaacaatcatataataattttaaaataaatagatttggcttcctctaaatgtccccggggactccgtgcatcttctgtggagtgtctccgtgagattcgggactcagatcctcaagtgcaactgacccacccgataagctgaggcttcatcatcccctggccggtctatgtcgactgggcacccgaggctcctctcccaccagctctcttggtcagctgaaagcaaactgttaacaccctggggagctggacgtatgagacccttggggtgggaggcgttgatttttgagagcaatcacctggccctggctggcagtaccgggacactgctgtggctccggggtgggctgtctccagaaaatgcctggcctgaggcagccacccgcatccagcccagagggtttattcttgcaatgtgctgctgcttcctgccctgagcacctggatcccggcttctgccctgaggccccttgagtcccacaggtagcaagcgcttgccctgcggctgctgcatggggctaactaacgcttcctcaccagtgtctgctaagtgtctcctctgtctcccacgccctgctctcctgtccccccagtttgtctgctgtgaggggacagaagaggtgtgtgccgcccccacccctgcccgggcccttgttcctgggattgctgttttcagctgtttgagctttgatcctggttctctggcttcctcaaagtgagctcggccagaggaggaaggccatgtgctttctggttgaagtcaagtctggtgccctggtggaggctgtgctgctgaggcggagctggggagagagtgcacacgggctgcgtggccaacccctctgggtagctgatgcccaaagacgctgcagtgcccaggacatctgggacctccctggggcccgcccgtgtgtcccgcgctgtgttcatctgcgggctagcctgtgacccgcgctgtgctcgtctgcgggctagcctgtgtcccgcgctctgcttgtctgcggtctagcctgtgacctggcagagagccaccagatgtcccgggctgagcactgccctctgagcaccttcacaggaagcccttctcctggtgagaagagatgccagcccctggcatctgggggcactggatccctggcctgagccctagcctctccccagcctgggggccccttcccagcaggctggccctgctccttctctacctgggacccttctgcctcctggctggaccctggaagctctgcagggcctgctgtccccctccctgccctccaggtatcctgaccaccggccctggctcccactgccatccactcctctcctttctggccgttccctggtccctgtcccagcccccctccccctctcacgagttacctcacccaggccagagggaagagggaaggaggccctggtcataccagcacgtcctcccacctccctcggccctggtccaccccctcagtgctggcctcagagcacagctctctccaagccaggccgcgcgccatccatcctccctgtcccccaacgtccttgccacagatcatgtccgccctgacacacatgggtctcagccatctctgccccagttaactccccatccataaagagcacatgccagccgacaccaaaataattcgggatggttccagtttagacctaagtggaaggagaaaccaccacctgccctgcaccttgttttttggtgaccttgataaaccatcttcagccatgaagccagctgtctcccaggaagctccagggcggtgcttcctcgggagctgactgataggtgggaggtggctgcccccttgcaccctcaggtgaccccacacaaggccactgctggaggccctggggactccaggaatgtcaatcagtgacctgccccccaggccccacacagccatggctgcatagaggcctgcctccaagggacctgtctgtctgccactgtggagtccctacagcgtgccccccacaggggagctggttctttgactgagatcagctggcagctcagggtcatcattcccagagggagcggtgccctggaggccacaggcctcctcatgtgtgtctgcgtccgctcgagcttactgagacactaaatctgttggtttctgctgtgccacctacccaccctgttggtgttgctttgttcctattgctaaagacaggaatgtccaggacactgagtgtgcaggtgcctgctggttctcacgtccgagctgctgaactccgctgggtcctgcttactgatggtctttgctctagtgctttccagggtccgtggaagcttttcctggaataaagcccacgcatcgaccctcacagcgcctcccctctttgaggcccagcagataccccactcctgcctttccagcaagatttttcagatgctgtgcatactcatcatattgatcacttttttcttcatgcctgattgtgatctgtcaatttcatgtcaggaaagggagtgacatttttacacttaagcgtttgctgagcaaatgtctgggtcttgcacaatgacaatgggtccctgtttttcccagaggctcttttgttctgcagggattgaagacactccagtcccacagtccccagctcccctggggcagggttggcagaatttcgacaacacatttttccaccctgactaggatgtgctcctcatggcagctgggaaccactgtccaataagggcctgggcttacacagctgcttctcattgagttacacccttaataaaataatcccattttatcctttttgtctctctgtcttcctctctctctgcctttcctcttctctctcctcctctctcatctccaggtgcaaatagtctacaaaccagttgacctgagcaaggtgacctccaagtgtggctcattaggcaacatccatcataaaccaggtagccctgtggaaggtgagggttgggacgggagggtgcagggggtggaggagtcctggtgaggctggaactgctccagacttcagaaggggctggaaaggatattttaggtagacctacatcaaggaaagtgttgagtgtgaaacttgcgggagcccaggaggcgtggtggctccagctcgctcctgcccaggccatgctgcccaagacaaggtgaggcgggagtgaagtgaaataaggcaggcacagaaagaaagcacatattctcggccgggcgctgtggctcacgcctgtaattccagcactttgggaggccaaggtgggtggatcatgaggtcaggagattgagaccatcctggctaacacagtgaaaccccgtctctactaaaaatacaaaaaattagccgggcgtggtggtgggcgcctgtagtcccagctactccggaggctgaggcaggaaaatggcgtgaacccggaaggcggagcttgcagtgagcggagtgagcagagatcgcgccactgcactccagcctgggcgacagagcgagactccgtctcaaaaaaaaaaagcacatgttctcgcttctttgtgggatccaggagatagagaatagaaggatggttaccagaggctgggaagggtagtgaggggatggtggggggatggtcaatgggtacaaaaaaaatagaataagacctagtatttgatagtgcaacagggtgactatagtcaataataatttaattgtacatttaaaaataactaaaagatagccgggtgcagtggcttacgtctgtaatcccagtactttgggaggctgaggtgggcgtttgagaccagcctggccaacatggtgaaaccccatctctactaaaaatacaaaaattagccaggcatggtggcgggcgcctgtaatcccagctactcgggaggctgaggcaggagaatcacttgaacctgggaggcagaggttgcagtgagccgagatcttgccactgcactccagcctgggtgacagtgaaactccgtctcaaaaataaaaataaaaatacagctgggcacggtggctcacgcctgtaatcccagcactttgggaggccgaggcgagcggatcacaaggtcaggagatatagaccatcctggctaacacggtgaaacccggtctctactaaaaatacaaaaaattagccaggcgtggtggcaggtgcctatagtcccagctactcacaaggctgaggcaggagaatggcatgaacctgggaggcggagcttgcagtgagccgagattgtgccactgcactccagcctgggcgagagagtgagactccgtctcaaaacaaaaacaaaaacaaaaacaaaaacaaacacacaacaaaaacctaaaagaatataaatggattgtttgtaacacaaaggacaaatgtttgaggggatggataccccattttccatgatgtgattattatacattgtgtgtctgtatcaaaacatctcatgagccccataaatatatacacctaactatgtacccacaaaaattaaaaaaatatattttttaaggtgaagagggaggcgagatgctggccttaacccctaacccgttgttctccctgcaagctgtccacagggcctctcagactcgaggttcagctatatggatgcatgagcttggtccccagccaacatgggagacacttcaccatcggcagcagctacagcacaggaaccctgggtcactgccatgtcccctctgtgactttgtttaaacagaaaatgatgctctgggccggctgtggtggcccacacctataatcccagcaccttgggaggcgggggtgggcagattgcctgaggtcaggagttggagatcagcctggccgacatggcgaaaccccatgtctactaaaaatacaaaaactagccaggcatggtggcacatgcctgtaatcccagctacttgggaggctgaagcaggagaatcacttgaacccaggaggcagaggctgagtgagccaagatcgtgccaatgcactccagcttgggtgagggagtgagactccgtctcaaaaaaaaaaaaaaagaaagaaaaagaaaagaaagtgatcctactggaaccatgcttactcccctccccacctcacactgtgtagaaattagtgctgtcggccaggcgcggtggctcatgcctgtaatcgcagcactttgggaggccaaggcaggcggatcacgaggtcaggagatcaagaccatcctggctaacacagtgaaaccctgtctctactaaaaatacaaaaaattagccgggcatggtggcaggcacctgtagtcccaactacttgggaggctgaggcaggagaatggcatgaacctgggaggcggagcttgcagtgagccaagatcgcgccactgcataccagcctaggtgacagagtgagactcagcaaaaaaagaaagaaagaaagaaagaaatcagtgctgtctatacttctttctgcagtgatggaaatattctgtatctgtgctgtccagtatagtagccactagctacatgtggcacttgaaacatggctggtacagttgaggaagagtggctgccatatcggacgacacagctatagattctgtcaccccaccccgagagtccagagcggggacttctgccttaggccctattcagggctgatttttacttgaacccttactgtgggaagagaaggccatgagaagttcagtctagaatgtgactccttattttctggctcccttggacactttgtgggatttagtctccctgtggaaagtattccacaagtggtgccactaccccagctgtgagagcagctgggagctgcttttgtcatctttccctggaaagtcctgtgggctgtctcttcctcatgccttgtcccatgcttgggcatggtgtcaagcgtcaggagggagaaagggtccttatttatttatttagagagggacccttcttctgttcccaggctggagtgcagtggtgcgatctcggctcactgcaacctccgcctcctgggttcaagtgattctcctgcctcagcctcctgagtagctgagattacaggcacatgccaacatgcccggctaattttttttttttttttttttttttttttttttttttttttgagatggagttgtactctcattgcccaggctggaatgtaatggcacaatctcggctcactgcaacctccacctcctggattcaagcaattctcctgtctcagcttcccaagtagctgggattacaggtgcccgccaccatgctcaactaatttttgtattttttttttagtagagacgaggtttcaccatgttggtcagactggtctcaaactcctgacctcaggtgatccacctgcctcggcctcccaaagtgctaggattacaggcatgagccaccacgcccggcctgaaagggttcttatttagtgtgcattttgacattcaatttaattccaaggtcttgtggggtcatggtttacaggatgttgatatagaaaagacttcacttaatgggccgggcgcagtggctcatgcctgtaatcccagcactttgggaggccgaggcaggcagatcaggaggtcaggagattgagaccatcctggctaacacagtgaaaccccatctctactgaaaatacaaaaaattagctgggcgtggtggcaggcacctgtagtcccagccactcggttggctgaggcaggagaatggcatgaacccgggaggcggagcttgcagtgagcagagaccatgccactgcactccagcctgggcgacagagcaagactctgtctcaagaaaaaaaaaaaaaaacagactttacttactggaagccaaccaatgtatatttagagtaatttttcctgggctgagctgtcatttacttttgcagtatctcaagaagaagagtttacagtgtaaatatttgatgcacactttgattatatagatgaagcaaactattttcaagagctttgcaaggacttacttgtatccaaacaccattctaaaaggagtcttacctacttctaaaggctggtctctacttggaaccacttgcttggccctggttcaagtcctgctgcaaacctggaagtcctgtcattgtcttcttccctccagagcagtggcacccaatctaatttttgctgtgccccagcagcccctggcactttgccctgtagactgcagacctcatgtaatgtatgttaagtccacagaaccacagaagatgatggcaagatgctcttgtgtgtgttgtgttctaggaggtggccaggtggaagtaaaatctgagaagcttgacttcaaggacagagtccagtcgaagattgggtccctggacaatatcacccacgtccctggcggaggaaataaaaaggtaaagggggtagggtgggttggatgctgcccttgggtatatgggcattaatcaagttgagtggacaaaggctggtccagttcccagaggaggaaaacagaggcttctgtgttgactggctggatgtgggccctcagcagcatccagtgggtctccactgcctgtctcaatcacctggagctttagcacgtttcacacctgggccccaacctggagaggctgaccaatgggtctcaggggcagctcggttgctggagtttttgtttttatttatttttatgtatttaaggcagggtctctgtattagtccattctcacactgctaataaagacatacccaagactgggtaatttataaaggaaagaggtttaatggactcacagttccacatggctggggaggcctcaaaatcatggcggaaggcaaaggagaagcaaaggcatttcttacatggcgacaggcaagagagcgtgtgcaggggaactcccatttataaaaccatcagacctcatgagatttattcactatcatgagaacagcatgggaaagacccgcccccatgattcagttacctcccactgggtccctcccatgacacatggaattatgggagctacaattcaagatgagatttgggtggggacacagccaaaccatatcagtctccctctgtcatccaggctggagtgcactggcatgatctcggctcactgcagcctctacctccctgggtcaggtgatcttcccacctcagcctcccaggtagctggaactacaggtacctgccactatgcctggctaaatattttgtatttcctgtggagacgaggttttgccacgttgcccaggctggtcttgaactcctgaggtcaagcaatatgcccacctcggcctcccaaggtgctgggattacaggtgtgagccacagtgctcggcctaagtcactgcagtttttaaagctcccaggtgattcttcagtgcagtcaaaagtgagaactggctgggtgcggtggctcatgcctgtaatcccagcaccttgggaggcgaaggtgggcagatggcttgaggtcaggagttcaagaccagcctggccaacatggtaaaaccccatctctactaaaaatacaaaagttagctgggtgtggtggtgcgtgcctgtaatcccagctacttgggaggctgaggcatgagaattgcttgaacccaggggacagaggttgtagtgagccgagatcgtgccactgcactccagcctgggcaacagagtgagattccatctcacaaaaaaaaaaaaaagcgagaaccactgtcctaggccctgatgtttgcaggcaactaaaaaaggaagtggacatccccagtcagctgtggcgcaccaagaacaagtcatgggaacataacctaattttctaaatgggttactaggcacttagagcaaaacaatgatgccgaaatcctgatttcagcaaagcctctgcctgcctgtcttggaagtatccacatgaggctgctggggccttggtgtccccagcagtttctagtctctaggtcttgctgtgggtgtctgtgcagtgagggtgtgtgtggcgctgggtgagctctgtctaggcctggcacaggatgcggtctggtagctgctgcttctcttctgcagaagcgcagccaagcaccctctggggtttcaggcccacacccagcctgaagttctgggagtggctcactttccaaccttcagggtctcccagcagctgactggggagtggtggagggaaaagggattgtattagtccgttttcacgccgctgatgaagacatacccgatactgggcagtctaaaagatagaggtctgatggactcacagttccacgtgactggggaggcctgacaatcatggtggaaggtgaaaggcttgtctcacacggtggcagacaagagaaaagagcttgtgcaggggaactcccctttataaaaccatcagatctcgggagacttattcactatcatgagaacagcacgggaaagaccctcctctatgattcaattacctcccaccaggtccctcccacaacatgtaggaattgtgggaactacaattcaagatgacatttgggtggggacacagccaaaccatatcagggcgtcccagaaagggtatagggtctgagacccaagtcagcatgagaaagtatgcttctcatggtggcccagttgggtggaagtggcagccgggccgtctttccaccaggccactcaagtagcagctgagagacccctgccctggccagtccccgccctcccctcttgccactgcctctggttctgaacagatgggcaccctcatcttgtatttgtgattaatgtctaacaatgtagttttgtgagaagggtttgctgatacagccttgctgcagatgctgcgaactgtggcctggggcagaccttacctccagacacgccctgaggcaggggagggcactggcccgtagctggccgagagctctcgggttgcgcgacagggatacttttcagcggctgggtcgctatccaaagtgagaaaacgaggagggaccaggaggctgtccgcctcaagagatgtgggggccaggtccagttatctggggaagcagtaagcttctctgctgtttctaaccccaggcctcccctggtctaaggcagggcctcccagcctcggggcactttaaagatatctgggcctggccccatccccacagtctgactgagtgggtctggatagggcctgagcattggtgatttcctgggtgaaaggaggcccctcacagtctctggaagcttctctgtgttaggaaaagctctgggcttgactctgctttgaaagtcaagatccgcaaatcctctcagcctcagtttctccttcagcaagatgaaatggaaatgctgtacctacgtcccggggtggttgtgagacccaaaaaagacaatgttctggaaggttcctggtgcgttgcagtcctctaagaacctgagttagagccacgctgagtctcagcttcttggctccttctgtttcaaactcgtccatgtgatagctcaggaagggtaggcagggccctgccccctactcagaaaacaccatcctggtcctggggatccccgcagcattagtcccctgttttcccagtgtattgagaaaaattgctaacaagcagtggggcacaccaccagcctcctgggttcctttcagtttggggatttttggacattcccaggaatgtcttaaaaaacacttcaaaaaacattaacataaatatttttatcaaagcctgtattaaatggtctttcaagaaaatacagtaacaggtcaggcatggtggctcatgcctgtaaccccagcactttgggaggccaaggcaggcagatcacctgaaatcaggagttcaagaccaacctggccaacacagccaaatcccatctctacaaaaaatacaaaaattagctgggtgtggtggcacacacctgtagtcccagctacttgggaggccgaggcaggagaattgcttgatcccggaggcggaggttgcagtgagccgagatcgtgccactgcactccagcgtgggtgacaaggtgaatctttgtctcaaaaaaaaaaaaaaaaaaaagataaaatacagtatacagtaatagagaacaatccttttttcaaagtagtgaccccaaatgaacaaaatatgcatctagcttaaatgcgaacctggttttctctacgcccattcaagcccctgcaataggggcccttcaccccgcatccatggactcctaaaattatatggaaaatggctgtgtgtgagtgtggatggacatgtgcacacatatttttggctttaccagatgctcaaagagcctaggacccaaaaagggctgagaatgaccgtgtcggccacttcagggtcatcaggaattgctgtgcactgctcacttctccagtgaacactttctgcttctgtgtttcctggtatcctttgggactcctggctaggtcatgtgtttctctactttcaaaagggcttcagccaggcacgatggcatgagcctgtagtcccagttgctctggaggttaaggtgggaagattgcttgagcccaggaatttgaggccagcctgggcaagtagataggtagatgattgatagatagatagatagataaatagatggatagataagtcgctagacagtcatccatccacccatccacacataaaaaggcctttgtcatgtcatgttttgtggcccacctgccagtgttgcccacagttgctgcccctccaaactcatcagtcactggcaaacaggaggaatgtgtggctcatgtctgggcatcagtggctgtgggagacatccttgatcttctccagcttctccttccacattttcctttgcaatctggcaatatctattaaaataaaatgtgcatgccttttgacctaagagcttcacttctaggacccacttacacgtgtgtgacatgatgttcatacgggtttatttatctgaggttgttcatacacaccattgcctgtaatcactaaaggcgggagcagcctacacatccatccacagaggagtagatgccttttggtacatccgtggcgacggaatactaagcagcctgtgtatctatacactcacacgtgtttgtttatgtgtggaatatctctggagggtacacaagaaacttaaaatgatcactgtctctggggagggtacctgggtgcctgggaggcaggtcagggaaggagtgggcacaggtattaccaattggaagacaataaaaacaacagctcctggccaggcgcagtggctcacgcctgtaatggcagcactctgagaggctgaggcgggcagattgcttgcgtccaggagttcaagaccagcctgggcaacatagcaaaaccccgtttctattaaaaatacaaaaaattagccaggtgtggtggcatgcacctgtaatcccagctactcgggaggctgaggtgggagaatcacctgagcctgggaggtcaaggctgcagtgaggtgagattgtgccaccgcactctagcctgggcgatagagcaagaccctgtctcaaaaacaaacaaaaaacagtccctggcactctgggccaggcctggcagggcagttggcagggctggtctttctctggcacttcatctcaccctccctcccttcctcttcttgcagattgaaacccacaagctgaccttccgcgagaacgccaaagccaagacagaccacggggcggagatcgtgtacaagtcgccagtggtgtctggggacacgtctccacggcatctcagcaatgtctcctccaccggcagcatcgacatggtagactcgccccagctcgccacgctagctgacgaggtgtctgcctccctggccaagcagggtttgtgatcaggcccctggggcggtcaataattgtggagaggagagaatgagagagtgtggaaaaaaaaagaataatgacccggcccccgccctctgcccccagctgctcctcgcagttcggttaattggttaatcacttaacctgcttttgtcactcggctttggctcgggacttcaaaatcagtgatgggagtaagagcaaatttcatctttccaaattgatgggtgggctagtaataaaatatttaaaaaaaaacattcaaaaacatggccacatccaacatttcctcaggcaattccttttgattcttttttcttccccctccatgtagaagagggagaaggagaggctctgaaagctgcttctgggggatttcaagggactgggggtgccaaccacctctggccctgttgtgggggtgtcacagaggcagtggcagcaacaaaggatttgaaacttggtgtgttcgtggagccacaggcagacgatgtcaaccttgtgtgagtgtgacgggggttggggtggggcgggaggccacgggggaggccgaggcaggggctgggcagaggggagaggaagcacaagaagtgggagtgggagaggaagccacgtgctggagagtagacatccccctccttgccgctgggagagccaaggcctatgccacctgcagcgtctgagcggccgcctgtccttggtggccgggggtgggggcctgctgtgggtcagtgtgccaccctctgcagggcagcctgtgggagaagggacagcgggtaaaaagagaaggcaagctggcaggagggtggcacttcgtggatgacctccttagaaaagactgaccttgatgtcttgagagcgctggcctcttcctccctccctgcagggtagggggcctgagttgaggggcttccctctgctccacagaaaccctgttttattgagttctgaaggttggaactgctgccatgattttggccactttgcagacctgggactttagggctaaccagttctctttgtaaggacttgtgcctcttgggagacgtccacccgtttccaagcctgggccactggcatctctggagtgtgtgggggtctgggaggcaggtcccgagccccctgtccttcccacggccactgcagtcacccctgtctgcgccgctgtgctgttgtctgccgtgagagcccaatcactgcctatacccctcatcacacgtcacaatgtcccgaattcccagcctcaccaccccttctcagtaatgaccctggttggttgcaggaggtacctactccatactgagggtgaaattaagggaaggcaaagtccaggcacaagagtgggaccccagcctctcactctcagttccactcatccaactgggaccctcaccacgaatctcatgatctgattcggttccctgtctcctcctcccgtcacagatgtgagccagggcactgctcagctgtgaccctaggtgtttctgccttgttgacatggagagagccctttcccctgagaaggcctggccccttcctgtgctgagcccacagcagcaggctgggtgtcttggttgtcagtggtggcaccaggatggaagggcaaggcacccagggcaggcccacagtcccgctgtcccccacttgcaccctagcttgtagctgccaacctcccagacagcccagcccgctgctcagctccacatgcatagtatcagccctccacacccgacaaaggggaacacacccccttggaaatggttcttttcccccagtcccagctggaagccatgctgtctgttctgctggagcagctgaacatatacatagatgttgccctgccctccccatctgcaccctgttgagttgtagttggatttgtctgtttatgcttggattcaccagagtgactatgatagtgaaaagaaaaaaaaaaaaaaaaaaggacgcatgtatcttgaaatgcttgtaaagaggtttctaacccaccctcacgaggtgtctctcacccccacactgggactcgtgtggcctgtgtggtgccaccctgctggggcctcccaagttttgaaaggctttcctcagcacctgggacccaacagagaccagcttctagcagctaaggaggccgttcagctgtgacgaaggcctgaagcacaggattaggactgaagcgatgatgtccccttccctacttccccttggggctccctgtgtcagggcacagactaggtcttgtggctggtctggcttgcggcgcgaggatggttctctctggtcatagcccgaagtctcatggcagtcccaaaggaggcttacaactcctgcatcacaagaaaaaggaagccactgccagctggggggatctgcagctcccagaagctccgtgagcctcagccacccctcagactgggttcctctccaagctcgccctctggaggggcagcgcagcctcccaccaagggccctgcgaccacagcagggattgggatgaattgcctgtcctggatctgctctagaggcccaagctgcctgcctgaggaaggatgacttgacaagtcaggagacactgttcccaaagccttgaccagagcacctcagcccgctgaccttgcacaaactccatctgctgccatgagaaaagggaagccgcctttgcaaaacattgctgcctaaagaaactcagcagcctcaggcccaattctgccacttctggtttgggtacagttaaaggcaaccctgagggacttggcagtagaaatccagggcctcccctggggctggcagcttcgtgtgcagctagagctttacctgaaaggaagtctctgggcccagaactctccaccaagagcctccctgccgttcgctgagtcccagcaattctcctaagttgaagggatctgagaaggagaaggaaatgtggggtagatttggtggtggttagagatatgcccccctcattactgccaacagtttcggctgcatttcttcacgcacctcggttcctcttcctgaagttcttgtgccctgctcttcagcaccatgggccttcttatacggaaggctctgggatctcccccttgtgggggcaggctcttggggccagcctaagatcatggtttagggtgatcagtgctggcagataaattgaaaaggcacgctggcttgtgatcttaaatgaggacaatccccccagggctgggcactcctcccctcccctcacttctcccacctgcagagccagtgtccttgggtgggctagataggatatactgtatgccggctccttcaagctgctgactcactttatcaatagttccatttaaattgacttcagtggtgagactgtatcctgtttgctattgcttgttgtgctatggggggaggggggaggaatgtgtaagatagttaacatgggcaaagggagatcttggggtgcagcacttaaactgcctcgtaacccttttcatgatttcaaccacatttgctagagggagggagcagccacggagttagaggcccttggggtttctcttttccactgacaggctttcccaggcagctggctagttcattccctccccagccaggtgcaggcgtaggaatatggacatctggttgctttggcctgctgccctctttcaggggtcctaagcccacaatcatgcctccctaagaccttggcatccttccctctaagccgttggcacctctgtgccacctctcacactggctccagacacacagcctgtgcttttggagctgagatcactcgcttcaccctcctcatctttgttctccaagtaaagccacgaggtcggggcgagggcagaggtgatcacctgcgtgtcccatctacagacctgcggcttcataaaacttctgatttctcttcagctttgaaaagggttaccctgggcactggcctagagcctcacctcctaatagacttagccccatgagtttgccatgttgagcaggactatttctggcacttgcaagtcccatgatttcttcggtaattctgagggtggggggagggacatgaaatcatcttagcttagctttctgtctgtgaatgtctatatagtgtattgtgtgttttaacaaatgatttacactgactgttgctgtaaaagtgaatttggaaataaagttattactctgattaaataaggtctccattcatggattccaaggacaagaaagtcatatagaatgtctattttttaagttctttcccacgcacccttagataatttagctcagaacaggaaatgatagtattaataaaagctggacatcaggattaacagctctctctggggccctgaaggtgagagttctcagacttgctcatttgcagttgcttctttgtgatgctggcaaaccatcctagtcccattcaaagggcaatacaaagccttgtggctgacctcacgatgcagcactcagtttgcaagaccggcaccagtgtatgcaaacctgagaaggttggggatgaggatatgggatctttcatccctggaaatttagtccagaggcctggggctggagcagaacaccaagccaatcagcttaatgaatggcttagattcctgctaggtttgcagagctgccttctttcctttggtaccttattatagattgaggagtatttctgctaaaccaagatagggataaccagatagcatcttcatagcaatgccacaaaggaaaacaaaaacaaaacagtaatccatcatattattccttagtaactatgccaaggtcatgatactgaatccttagattgtttcaaaatactacttttctttgctcttcctgatgtgtttgccaccgcaggcagatgtttaagtaaaacagattttaactgcagctacaaaagcagcaacaggccagcaaaagagaagtgctatctcagagagcatggctttcagagccacaagagacagcctcactggctgtttcagcttgactgccatgcaaagaagagagcagagggagaaccagccccacccacttattcatcttgtacaaaaaaaaagcacctaccagcctaggctacatagtgagacactatctccacaaaaaacccacgaaaactagctgggtatggtggcacatgcctacagtcccagctactggtaaggctgtggtgggaggatctcttgaggccaggaaggagatccaggctgcagtgagccaagattgcaccactgcactccagtctggacaatcgagcaagatcccatctcaaacaataaaaaaaaaaagcgtgtaacctcctcagaagaaagatgttataatctcaggcagcaggcaagaaccaatccaggctctaagc

SEQ ID NO: 3 - DNA, 21 bp, synthetic construct
  source 1..21: mol_type = other DNA
aagattgggtccctggacaat

SEQ ID NO: 4 - DNA, 26 bp, synthetic construct
  source 1..26: mol_type = other DNA
agcttgtgggtttcaatctttttatt

SEQ ID NO: 5 - DNA, 19 bp, synthetic construct
  source 1..19: mol_type = other DNA
cacccacgtccctggcgga

SEQ ID NO: 6-10 - skipped (5 entries)

SEQ ID NO: 11 - RNA, 23 nt, synthetic construct
  source 1..23: mol_type = other RNA
taaagtgagtcagcagcttgaag

SEQ ID NO: 12 - RNA, 23 nt, synthetic construct
  source 1..23: mol_type = other RNA
aaatggaactattgataaagtga

SEQ ID NO: 13 - RNA, 23 nt, synthetic construct
  source 1..23: mol_type = other RNA
aggatacagtctcaccactgaag

SEQ ID NO: 14 - RNA, 23 nt, synthetic construct
  source 1..23: mol_type = other RNA
tcttacacattcctcccccctcc

SEQ ID NO: 15 - RNA, 23 nt, synthetic construct
  source 1..23: mol_type = other RNA
tgcccatgttaactatcttacac

SEQ ID NO: 16 - RNA, 23 nt, synthetic construct
  source 1..23: mol_type = other RNA
aagggttacgaggcagtttaagt

SEQ ID NO: 17 - RNA, 23 nt, synthetic construct
  source 1..23: mol_type = other RNA
aaaccccaagggcctctaactcc

SEQ ID NO: 18 - RNA, 23 nt, synthetic construct
  source 1..23: mol_type = other RNA
tgaactagccagctgcctgggaa

SEQ ID NO: 19 - RNA, 23 nt, synthetic construct
  source 1..23: mol_type = other RNA
tggctggggagggaatgaactag

SEQ ID NO: 20 - RNA, 23 nt, synthetic construct
  source 1..23: mol_type = other RNA
tattcctacgcctgcacctggct

SEQ ID NO: 21 - RNA, 23 nt, synthetic construct
  source 1..23: mol_type = other RNA
tagggaggcatgattgtgggctt

SEQ ID NO: 22 - RNA, 23 nt, synthetic construct
  source 1..23: mol_type = other RNA
aggatgccaaggtcttagggagg

SEQ ID NO: 23 - RNA, 23 nt, synthetic construct
  source 1..23: mol_type = other RNA
aacggcttagagggaaggatgcc

SEQ ID NO: 24 - RNA, 23 nt, synthetic construct
  source 1..23: mol_type = other RNA
agtgtgagaggtggcacagaggt

SEQ ID NO: 25 - RNA, 23 nt, synthetic construct
  source 1..23: mol_type = other RNA
tgtgtgtctggagccagtgtgag

SEQ ID NO: 26 - RNA, 23 nt, synthetic construct
  source 1..23: mol_type = other RNA
tccaaaagcacaggctgtgtgtc

SEQ ID NO: 27 - RNA, 23 nt, synthetic construct
  source 1..23: mol_type = other RNA
tacttggagaacaaagatgagga

SEQ ID NO: 28 - RNA, 23 nt, synthetic construct
  source 1..23: mol_type = other RNA
atgggacacgcaggtgatcacct

SEQ ID NO: 29 - RNA, 23 nt, synthetic construct
  source 1..23: mol_type = other RNA
aagctgaagagaaatcagaagtt

SEQ ID NO: 30 - RNA, 23 nt, synthetic construct
  source 1..23: mol_type = other RNA
ttaggaggtgaggctctaggcca

SEQ ID NO: 31 - RNA, 23 nt, synthetic construct
  source 1..23: mol_type = other RNA
atggggctaagtctattaggagg

SEQ ID NO: 32 - RNA, 23 nt, synthetic construct
  source 1..23: mol_type = other RNA
agaaatagtcctgctcaacatgg

SEQ ID NO: 33 - RNA, 23 nt, synthetic construct
  source 1..23: mol_type = other RNA
accgaagaaatcatgggacttgc

SEQ ID NO: 34 - RNA, 23 nt, synthetic construct
  source 1..23: mol_type = other RNA
tgatttcatgtccctccccccac

SEQ ID NO: 35 - RNA, 23 nt, synthetic construct
  source 1..23: mol_type = other RNA
aaagctaagctaagatgatttca

SEQ ID NO: 36 - RNA, 23 nt, synthetic construct
  source 1..23: mol_type = other RNA
acaatacactatatagacattca

SEQ ID NO: 37 - RNA, 23 nt, synthetic construct
  source 1..23: mol_type = other RNA
acagtcagtgtaaatcatttgtt

SEQ ID NO: 38 - RNA, 23 nt, synthetic construct
  source 1..23: mol_type = other RNA
ttcacttttacagcaacagtcag

SEQ ID NO: 39 - RNA, 23 nt, synthetic construct
  source 1..23: mol_type = other RNA
aactttatttccaaattcacttt

SEQ ID NO: 40 - RNA, 21 nt, synthetic construct
  source 1..21: mol_type = other RNA
tcaagctgctgactcacttta

SEQ ID NO: 41 - RNA, 21 nt, synthetic construct
  source 1..21: mol_type = other RNA
actttatcaatagttccattt

SEQ ID NO: 42 - RNA, 21 nt, synthetic construct
  source 1..21: mol_type = other RNA
tcagtggtgagactgtatcct

SEQ ID NO: 43 - RNA, 21 nt, synthetic construct
  source 1..21: mol_type = other RNA
aggggggaggaatgtgtaaga

SEQ ID NO: 44 - RNA, 21 nt, synthetic construct
  source 1..21: mol_type = other RNA
gtaagatagttaacatgggca

SEQ ID NO: 45 - RNA, 21 nt, synthetic construct
  source 1..21: mol_type = other RNA
ttaaactgcctcgtaaccctt

SEQ ID NO: 46 - RNA, 21 nt, synthetic construct
  source 1..21: mol_type = other RNA
agttagaggcccttggggttt

SEQ ID NO: 47 - RNA, 21 nt, synthetic construct
  source 1..21: mol_type = other RNA
cccaggcagctggctagttca

SEQ ID NO: 48 - RNA, 21 nt, synthetic construct
  source 1..21: mol_type = other RNA
agttcattccctccccagcca

SEQ ID NO: 49 - RNA, 21 nt, synthetic construct
  source 1..21: mol_type = other RNA
ccaggtgcaggcgtaggaata

SEQ ID NO: 50 - RNA, 21 nt, synthetic construct
  source 1..21: mol_type = other RNA
gcccacaatcatgcctcccta

SEQ ID NO: 51 - RNA, 21 nt, synthetic construct
  source 1..21: mol_type = other RNA
tccctaagaccttggcatcct

SEQ ID NO: 52 - RNA, 21 nt, synthetic construct
  source 1..21: mol_type = other RNA
catccttccctctaagccgtt

SEQ ID NO: 53 - RNA, 21 nt, synthetic construct
  source 1..21: mol_type = other RNA
ctctgtgccacctctcacact

SEQ ID NO: 54 - RNA, 21 nt, synthetic construct
  source 1..21: mol_type = other RNA
cacactggctccagacacaca

SEQ ID NO: 55 - RNA, 21 nt, synthetic construct
  source 1..21: mol_type = other RNA
cacacagcctgtgcttttgga

SEQ ID NO: 56 - RNA, 21 nt, synthetic construct
  source 1..21: mol_type = other RNA
ctcatctttgttctccaagta

SEQ ID NO: 57 - RNA, 21 nt, synthetic construct
  source 1..21: mol_type = other RNA
gtgatcacctgcgtgtcccat

SEQ ID NO: 58 - RNA, 21 nt, synthetic construct
  source 1..21: mol_type = other RNA
cttctgatttctcttcagctt

SEQ ID NO: 59 - RNA, 21 nt, synthetic construct
  source 1..21: mol_type = other RNA
gcctagagcctcacctcctaa

SEQ ID NO: 60 - RNA, 21 nt, synthetic construct
  source 1..21: mol_type = other RNA
tcctaatagacttagccccat

SEQ ID NO: 61 - RNA, 21 nt, synthetic construct
  source 1..21: mol_type = other RNA
atgttgagcaggactatttct

SEQ ID NO: 62 - RNA, 21 nt, synthetic construct
  source 1..21: mol_type = other RNA
aagtcccatgatttcttcggt

SEQ ID NO: 63 - RNA, 21 nt, synthetic construct
  source 1..21: mol_type = other RNA
ggggggagggacatgaaatca

SEQ ID NO: 64 - RNA, 21 nt, synthetic construct
  source 1..21: mol_type = other RNA
aaatcatcttagcttagcttt

SEQ ID NO: 65 - RNA, 21 nt, synthetic construct
  source 1..21: mol_type = other RNA
aatgtctatatagtgtattgt

SEQ ID NO: 66 - RNA, 21 nt, synthetic construct
  source 1..21: mol_type = other RNA
caaatgatttacactgactgt

SEQ ID NO: 67 - RNA, 21 nt, synthetic construct
  source 1..21: mol_type = other RNA
gactgttgctgtaaaagtgaa

SEQ ID NO: 68 - RNA, 21 nt, synthetic construct
  source 1..21: mol_type = other RNA
agtgaatttggaaataaagtt

SEQ ID NO: 69 - RNA, 23 nt, synthetic construct
  source 1..23: mol_type = other RNA
aaacctctttacaagcatttcaa

SEQ ID NO: 70 - RNA, 23 nt, synthetic construct
  source 1..23: mol_type = other RNA
agacacctcgtgagggtgggtta

SEQ ID NO: 71 - RNA, 23 nt, synthetic construct
  source 1..23: mol_type = other RNA
tcaaaacttgggaggccccagca

SEQ ID NO: 72 - RNA, 23 nt, synthetic construct
  source 1..23: mol_type = other RNA
ttgggtcccaggtgctgaggaaa

SEQ ID NO: 73 - RNA, 23 nt, synthetic construct
  source 1..23: mol_type = other RNA
agaagctggtctctgttgggtcc

SEQ ID NO: 74 - RNA, 23 nt, synthetic construct
  source 1..23: mol_type = other RNA
tgcttcaggccttcgtcacagct

SEQ ID NO: 75 - RNA, 23 nt, synthetic construct
  source 1..23: mol_type = other RNA
tcagtcctaatcctgtgcttcag

SEQ ID NO: 76 - RNA, 23 nt, synthetic construct
  source 1..23: mol_type = other RNA
aggggaagtagggaaggggacat

SEQ ID NO: 77 - RNA, 23 nt, synthetic construct
  source 1..23: mol_type = other RNA
aaggggaagtagggaaggggaca

SEQ ID NO: 78 - RNA, 23 nt, synthetic construct
  source 1..23: mol_type = other RNA
tagtctgtgccctgacacaggga

SEQ ID NO: 79 - RNA, 23 nt, synthetic construct
  source 1..23: mol_type = other RNA
accagccacaagacctagtctgt

SEQ ID NO: 80 - RNA, 23 nt, synthetic construct
  source 1..23: mol_type = other RNA
aagccagaccagccacaagacct

SEQ ID NO: 81 - RNA, 23 nt, synthetic construct
  source 1..23: mol_type = other RNA
tgaccagagagaaccatcctcgc

SEQ ID NO: 82 - RNA, 23 nt, synthetic construct
  source 1..23: mol_type = other RNA
tgagacttcgggctatgaccaga

SEQ ID NO: 83 - RNA, 23 nt, synthetic construct
  source 1..23: mol_type = other RNA
aggagttgtaagcctcctttggg

SEQ ID NO: 84 - RNA, 23 nt, synthetic construct
  source 1..23: mol_type = other RNA
tttttcttgtgatgcaggagttg

SEQ ID NO: 85 - RNA, 23 nt, synthetic construct
  source 1..23: mol_type = other RNA
ttggagaggaacccagtctgagg

SEQ ID NO: 86 - RNA, 23 nt, synthetic construct
  source 1..23: mol_type = other RNA
tcatcccaatccctgctgtggtc

SEQ ID NO: 87 - RNA, 23 nt, synthetic construct
  source 1..23: mol_type = other RNA
tccaggacaggcaattcatccca

SEQ ID NO: 88 - RNA, 23 nt, synthetic construct
  source 1..23: mol_type = other RNA
atccttcctcaggcaggcagctt

SEQ ID NO: 89 - RNA, 23 nt, synthetic construct
  source 1..23: mol_type = other RNA
tgggaacagtgtctcctgacttg

SEQ ID NO: 90 - RNA, 23 nt, synthetic construct
  source 1..23: mol_type = other RNA
tttgtgcaaggtcagcgggctga

SEQ ID NO: 91 - RNA, 23 nt, synthetic construct
  source 1..23: mol_type = other RNA
tggcagcagatggagtttgtgca

SEQ ID NO: 92 - RNA, 23 nt, synthetic construct
  source 1..23: mol_type = other RNA
tgttttgcaaaggcggcttccct

SEQ ID NO: 93 - RNA, 23 nt, synthetic construct
  source 1..23: mol_type = other RNA
ttctttaggcagcaatgttttgc

SEQ ID NO: 94 - RNA, 23 nt, synthetic construct
  source 1..23: mol_type = other RNA
agaattgggcctgaggctgctga

SEQ ID NO: 95 - RNA, 23 nt, synthetic construct
  source 1..23: mol_type = other RNA
aagtccctcagggttgcctttaa

SEQ ID NO: 96 - RNA, 23 nt, synthetic construct
  source 1..23: mol_type = other RNA
tggatttctactgccaagtccct

SEQ ID NO: 97 - RNA, 23 nt, synthetic construct
  source 1..23: mol_type = other RNA
aggggaggccctggatttctact

SEQ ID NO: 98 - RNA, 23 nt, synthetic construct
  source 1..23: mol_type = other RNA
tctagctgcacacgaagctgcca

SEQ ID NO: 99 - RNA, 23 nt, synthetic construct
  source 1..23: mol_type = other RNA
tgggcccagagacttcctttcag

SEQ ID NO: 100 - RNA, 23 nt, synthetic construct
  source 1..23: mol_type = other RNA
agggaggctcttggtggagagtt

SEQ ID NO: 101 - RNA, 23 nt, synthetic construct
  source 1..23: mol_type = other RNA
aattgctgggactcagcgaacgg

SEQ ID NO: 102 - RNA, 23 nt, synthetic construct
  source 1..23: mol_type = other RNA
tctccttctcagatcccttcaac

SEQ ID NO: 103 - RNA, 23 nt, synthetic construct
  source 1..23: mol_type = other RNA
taccccacatttccttctccttc

SEQ ID NO: 104 - RNA, 23 nt, synthetic construct
  source 1..23: mol_type = other RNA
aaccaccaccaaatctaccccac

SEQ ID NO: 105 - RNA, 23 nt, synthetic construct
  source 1..23: mol_type = other RNA
tgttggcagtaatgaggggggca

SEQ ID NO: 106 - RNA, 23 nt, synthetic construct
  source 1..23: mol_type = other RNA
aaatgcagccgaaactgttggca

SEQ ID NO: 107 - RNA, 23 nt, synthetic construct
  source 1..23: mol_type = other RNA
agcagggcacaagaacttcagga

SEQ ID NO: 108 - RNA, 23 nt, synthetic construct
  source 1..23: mol_type = other RNA
atggtgctgaagagcagggcaca

SEQ ID NO: 109 - RNA, 23 nt, synthetic construct
  source 1..23: mol_type = other RNA
tgatcttaggctggccccaagag

SEQ ID NO: 110 - RNA, 23 nt, synthetic construct
  source 1..23: mol_type = other RNA
ttatctgccagcactgatcaccc

SEQ ID NO: 111 - RNA, 23 nt, synthetic construct
  source 1..23: mol_type = other RNA
taagatcacaagccagcgtgcct

SEQ ID NO: 112 - RNA, 23 nt, synthetic construct
  source 1..23: mol_type = other RNA
atctagcccacccaaggacactg

SEQ ID NO: 113 - RNA, 21 nt, synthetic construct
  source 1..21: mol_type = other RNA
gaaatgcttgtaaagaggttt

SEQ ID NO: 114 - RNA, 21 nt, synthetic construct
  source 1..21: mol_type = other RNA
acccaccctcacgaggtgtct

SEQ ID NO: 115 - RNA, 21 nt, synthetic construct
  source 1..21: mol_type = other RNA
ctggggcctcccaagttttga

SEQ ID NO: 116 - RNA, 21 nt, synthetic construct
  source 1..21: mol_type = other RNA
tcctcagcacctgggacccaa

SEQ ID NO: 117 - RNA, 21 nt, synthetic construct
  source 1..21: mol_type = other RNA
acccaacagagaccagcttct

SEQ ID NO: 118 - RNA, 21 nt, synthetic construct
  source 1..21: mol_type = other RNA
ctgtgacgaaggcctgaagca

SEQ ID NO: 119 - RNA, 21 nt, synthetic construct
  source 1..21: mol_type = other RNA
gaagcacaggattaggactga

SEQ ID NO: 120 - RNA, 21 nt, synthetic construct
  source 1..21: mol_type = other RNA
gtccccttccctacttcccct

SEQ ID NO: 121 - RNA, 21 nt, synthetic construct
  source 1..21: mol_type = other RNA
tccccttccctacttcccctt

SEQ ID NO: 122 - RNA, 21 nt, synthetic construct
  source 1..21: mol_type = other RNA
cctgtgtcagggcacagacta

SEQ ID NO: 123 - RNA, 21 nt, synthetic construct
  source 1..21: mol_type = other RNA
agactaggtcttgtggctggt

SEQ ID NO: 124 - RNA, 21 nt, synthetic construct
  source 1..21: mol_type = other RNA
gtcttgtggctggtctggctt

SEQ ID NO: 125 - RNA, 21 nt, synthetic construct
  source 1..21: mol_type = other RNA
gaggatggttctctctggtca

SEQ ID NO: 126 - RNA, 21 nt, synthetic construct
  source 1..21: mol_type = other RNA
tggtcatagcccgaagtctca

SEQ ID NO: 127 - RNA, 21 nt, synthetic construct
  source 1..21: mol_type = other RNA
caaaggaggcttacaactcct

SEQ ID NO: 128 - RNA, 21 nt, synthetic construct
  source 1..21: mol_type = other RNA
actcctgcatcacaagaaaaa

SEQ ID NO: 129 - RNA, 21 nt, synthetic construct
  source 1..21: mol_type = other RNA
tcagactgggttcctctccaa

SEQ ID NO: 130 - RNA, 21 nt, synthetic construct
  source 1..21: mol_type = other RNA
ccacagcagggattgggatga

SEQ ID NO: 131 - RNA, 21 nt, synthetic construct
  source 1..21: mol_type = other RNA
ggatgaattgcctgtcctgga

SEQ ID NO: 132 - RNA, 21 nt, synthetic construct
  source 1..21: mol_type = other RNA
gctgcctgcctgaggaaggat

SEQ ID NO: 133 - RNA, 21 nt, synthetic construct
  source 1..21: mol_type = other RNA
agtcaggagacactgttccca

SEQ ID NO: 134 - RNA, 21 nt, synthetic construct
  source 1..21: mol_type = other RNA
agcccgctgaccttgcacaaa

SEQ ID NO: 135 - RNA, 21 nt, synthetic construct
  source 1..21: mol_type = other RNA
cacaaactccatctgctgcca

SEQ ID NO: 136 - RNA, 21 nt, synthetic construct
  source 1..21: mol_type = other RNA
ggaagccgcctttgcaaaaca

SEQ ID NO: 137 - RNA, 21 nt, synthetic construct
  source 1..21: mol_type = other RNA
aaaacattgctgcctaaagaa

SEQ ID NO: 138 - RNA, 21 nt, synthetic construct
  source 1..21: mol_type = other RNA
agcagcctcaggcccaattct

SEQ ID NO: 139 - RNA, 21 nt, synthetic construct
  source 1..21: mol_type = other RNA
aaaggcaaccctgagggactt

SEQ ID NO: 140 - RNA, 21 nt, synthetic construct
  source 1..21: mol_type = other RNA
ggacttggcagtagaaatcca

SEQ ID NO: 141 - RNA, 21 nt, synthetic construct
  source 1..21: mol_type = other RNA
tagaaatccagggcctcccct

SEQ ID NO: 142 - RNA, 21 nt, synthetic construct
  source 1..21: mol_type = other RNA
gcagcttcgtgtgcagctaga

SEQ ID NO: 143 - RNA, 21 nt, synthetic construct
  source 1..21: mol_type = other RNA
gaaaggaagtctctgggccca

SEQ ID NO: 144 - RNA, 21 nt, synthetic construct
  source 1..21: mol_type = other RNA
ctctccaccaagagcctccct

SEQ ID NO: 145 - RNA, 21 nt, synthetic construct
  source 1..21: mol_type = other RNA
gttcgctgagtcccagcaatt

SEQ ID NO: 146 - RNA, 21 nt, synthetic construct
  source 1..21: mol_type = other RNA
tgaagggatctgagaaggaga

SEQ ID NO: 147 - RNA, 21 nt, synthetic construct
  source 1..21: mol_type = other RNA
aggagaaggaaatgtggggta

SEQ ID NO: 148 - RNA, 21 nt, synthetic construct
  source 1..21: mol_type = other RNA
ggggtagatttggtggtggtt

SEQ ID NO: 149 - RNA, 21 nt, synthetic construct
  source 1..21: mol_type = other RNA
cccccctcattactgccaaca

SEQ ID NO: 150 - RNA, 21 nt, synthetic construct
  source 1..21: mol_type = other RNA
ccaacagtttcggctgcattt

SEQ ID NO: 151 - RNA, 21 nt, synthetic construct
  source 1..21: mol_type = other RNA
ctgaagttcttgtgccctgct

SEQ ID NO: 152 - RNA, 21 nt, synthetic construct
  source 1..21: mol_type = other RNA
tgccctgctcttcagcaccat

SEQ ID NO: 153 - RNA, 21 nt, synthetic construct
  source 1..21: mol_type = other RNA
cttggggccagcctaagatca

SEQ ID NO: 154 - RNA, 21 nt, synthetic construct
  source 1..21: mol_type = other RNA
gtgatcagtgctggcagataa

SEQ ID NO: 155 - RNA, 21 nt, synthetic construct
  source 1..21: mol_type = other RNA
gcacgctggcttgtgatctta

SEQ ID NO: 156 - RNA, 21 nt, synthetic construct
  source 1..21: mol_type = other RNA
gtgtccttgggtgggctagat

SEQ ID NO: 157 - RNA, 23 nt, synthetic construct
  source 1..23: mol_type = other RNA
tcacactcacacaaggttgacat

SEQ ID NO: 158 - RNA, 23 nt, synthetic construct
  source 1..23: mol_type = other RNA
tcttgtgcttcctctcccctctg

SEQ ID NO: 159 - RNA, 23 nt, synthetic construct
  source 1..23: mol_type = other RNA
tctcccactcccacttcttgtgc

SEQ ID NO: 160 - RNA, 23 nt, synthetic construct
  source 1..23: mol_type = other RNA
tactctccagcacgtggcttcct

SEQ ID NO: 161 - RNA, 23 nt, synthetic construct
  source 1..23: mol_type = other RNA
aaggagggggatgtctactctcc

SEQ ID NO: 162 - RNA, 23 nt, synthetic construct
  source 1..23: mol_type = other RNA
tttacccgctgtcccttctccca

SEQ ID NO: 163 - RNA, 23 nt, synthetic construct
  source 1..23: mol_type = other RNA
agcttgccttctctttttacccg

SEQ ID NO: 164 - RNA, 23 nt, synthetic construct
  source 1..23: mol_type = other RNA
aggaggtcatccacgaagtgcca

SEQ ID NO: 165 - RNA, 23 nt, synthetic construct
  source 1..23: mol_type = other RNA
aagaggccagcgctctcaagaca

SEQ ID NO: 166 - RNA, 23 nt, synthetic construct
  source 1..23: mol_type = other RNA
tttctgtggagcagagggaagcc

SEQ ID NO: 167 - RNA, 23 nt, synthetic construct
  source 1..23: mol_type = other RNA
ttccaaccttcagaactcaataa

SEQ ID NO: 168 - RNA, 23 nt, synthetic construct
  source 1..23: mol_type = other RNA
aaatcatggcagcagttccaacc

SEQ ID NO: 169 - RNA, 23 nt, synthetic construct
  source 1..23: mol_type = other RNA
tctgcaaagtggccaaaatcatg

SEQ ID NO: 170 - RNA, 23 nt, synthetic construct
  source 1..23: mol_type = other RNA
aagagaactggttagccctaaag

SEQ ID NO: 171 - RNA, 23 nt, synthetic construct
  source 1..23: mol_type = other RNA
aaacgggtggacgtctcccaaga

SEQ ID NO: 172 - RNA, 23 nt, synthetic construct
  source 1..23: mol_type = other RNA
acacactccagagatgccagtgg

SEQ ID NO: 173 - RNA, 23 nt, synthetic construct
  source 1..23: mol_type = other RNA
agacccccacacactccagagat

SEQ ID NO: 174 - RNA, 23 nt, synthetic construct
  source 1..23: mol_type = other RNA
tctcacggcagacaacagcacag

SEQ ID NO: 175 - RNA, 23 nt, synthetic construct
  source 1..23: mol_type = other RNA
agtgattgggctctcacggcaga

SEQ ID NO: 176 - RNA, 23 nt, synthetic construct
  source 1..23: mol_type = other RNA
atgaggggtataggcagtgattg

SEQ ID NO: 177 - RNA, 23 nt, synthetic construct
  source 1..23: mol_type = other RNA
acattgtgacgtgtgatgagggg

SEQ ID NO: 178 - RNA, 23 nt, synthetic construct
  source 1..23: mol_type = other RNA
aaggggtggtgaggctgggaatt

SEQ ID NO: 179 - RNA, 23 nt, synthetic construct
  source 1..23: mol_type = other RNA
agggtcattactgagaaggggtg

SEQ ID NO: 180 - RNA, 23 nt, synthetic construct
  source 1..23: mol_type = other RNA
ttaatttcaccctcagtatggag

SEQ ID NO: 181 - RNA, 23 nt, synthetic construct
  source 1..23: mol_type = other RNA
aactgagagtgagaggctggggt

SEQ ID NO: 182 - RNA, 23 nt, synthetic construct
  source 1..23: mol_type = other RNA
tggtgagggtcccagttggatga

SEQ ID NO: 183 - RNA, 23 nt, synthetic construct
  source 1..23: mol_type = other RNA
agatcatgagattcgtggtgagg

SEQ ID NO: 184 - RNA, 23 nt, synthetic construct
  source 1..23: mol_type = other RNA
acagggaaccgaatcagatcatg

SEQ ID NO: 185 - RNA, 23 nt, synthetic construct
  source 1..23: mol_type = other RNA
tcacatctgtgacgggaggagga

SEQ ID NO: 186 - RNA, 23 nt, synthetic construct
  source 1..23: mol_type = other RNA
agtgccctggctcacatctgtga

SEQ ID NO: 187 - RNA, 23 nt, synthetic construct
  source 1..23: mol_type = other RNA
acctagggtcacagctgagcagt

SEQ ID NO: 188 - RNA, 23 nt, synthetic construct
  source 1..23: mol_type = other RNA
acaaccaagacacccagcctgct

SEQ ID NO: 189 - RNA, 23 nt, synthetic construct
  source 1..23: mol_type = other RNA
ttccatcctggtgccaccactga

SEQ ID NO: 190 - RNA, 23 nt, synthetic construct
  source 1..23: mol_type = other RNA
tacaagctagggtgcaagtgggg

SEQ ID NO: 191 - RNA, 23 nt, synthetic construct
  source 1..23: mol_type = other RNA
tgggaggttggcagctacaagct

SEQ ID NO: 192 - RNA, 23 nt, synthetic construct
  source 1..23: mol_type = other RNA
tgtctgggaggttggcagctaca

SEQ ID NO: 193 - RNA, 23 nt, synthetic construct
  source 1..23: mol_type = other RNA
tatgcatgtggagctgagcagcg

SEQ ID NO: 194 - RNA, 23 nt, synthetic construct
  source 1..23: mol_type = other RNA
tttgtcgggtgtggagggctgat

SEQ ID NO: 195 - RNA, 23 nt, synthetic construct
  source 1..23: mol_type = other RNA
accatttccaagggggtgtgttc

SEQ ID NO: 196 - RNA, 23 nt, synthetic construct
  source 1..23: mol_type = other RNA
ttccagctgggactgggggaaaa

SEQ ID NO: 197 - RNA, 23 nt, synthetic construct
  source 1..23: mol_type = other RNA
aacagacagcatggcttccagct

SEQ ID NO: 198 - RNA, 23 nt, synthetic construct
  source 1..23: mol_type = other RNA
atctatgtatatgttcagctgct

SEQ ID NO: 199 - RNA, 23 nt, synthetic construct
  source 1..23: mol_type = other RNA
actcaacagggtgcagatgggga

SEQ ID NO: 200 - RNA, 23 nt, synthetic construct
  source 1..23: mol_type = other RNA
acaaatccaactacaactcaaca

SEQ ID NO: 201 - RNA, 23 nt, synthetic construct
  source 1..23: mol_type = other RNA
tccaagcataaacagacaaatcc

SEQ ID NO: 202 - RNA, 23 nt, synthetic construct
  source 1..23: mol_type = other RNA
agtcactctggtgaatccaagca

SEQ ID NO: 203 - RNA, 23 nt, synthetic construct
  source 1..23: mol_type = other RNA
tcttttcactatcatagtcactc

SEQ ID NO: 204 - RNA, 23 nt, synthetic construct
  source 1..23: mol_type = other RNA
tttttttcttttcactatcatag

SEQ ID NO: 205 - RNA, 21 nt, synthetic construct
  source 1..21: mol_type = other RNA
gtcaaccttgtgtgagtgtga

SEQ ID NO: 206 - RNA, 21 nt, synthetic construct
  source 1..21: mol_type = other RNA
gaggggagaggaagcacaaga

SEQ ID NO: 207 - RNA, 21 nt, synthetic construct
  source 1..21: mol_type = other RNA
acaagaagtgggagtgggaga

SEQ ID NO: 208 - RNA, 21 nt, synthetic construct
  source 1..21: mol_type = other RNA
gaagccacgtgctggagagta

SEQ ID NO: 209 - RNA, 21 nt, synthetic construct
  source 1..21: mol_type = other RNA
agagtagacatccccctcctt

SEQ ID NO: 210 - RNA, 21 nt, synthetic construct
  source 1..21: mol_type = other RNA
ggagaagggacagcgggtaaa

SEQ ID NO: 211 - RNA, 21 nt, synthetic construct
  source 1..21: mol_type = other RNA
ggtaaaaagagaaggcaagct

SEQ ID NO: 212 - RNA, 21 nt, synthetic construct
  source 1..21: mol_type = other RNA
gcacttcgtggatgacctcct

SEQ ID NO: 213 - RNA, 21 nt, synthetic construct
  source 1..21: mol_type = other RNA
tcttgagagcgctggcctctt

SEQ ID NO: 214 - RNA, 21 nt, synthetic construct
  source 1..21: mol_type = other RNA
cttccctctgctccacagaaa

SEQ ID NO: 215 - RNA, 21 nt, synthetic construct
  source 1..21: mol_type = other RNA
attgagttctgaaggttggaa

SEQ ID NO: 216 - RNA, 21 nt, synthetic construct
  source 1..21: mol_type = other RNA
ttggaactgctgccatgattt

SEQ ID NO: 217 - RNA, 21 nt, synthetic construct
  source 1..21: mol_type = other RNA
tgattttggccactttgcaga

SEQ ID NO: 218 - RNA, 21 nt, synthetic construct
  source 1..21: mol_type = other RNA
ttagggctaaccagttctctt

SEQ ID NO: 219 - RNA, 21 nt, synthetic construct
  source 1..21: mol_type = other RNA
ttgggagacgtccacccgttt

SEQ ID NO: 220 - RNA, 21 nt, synthetic construct
  source 1..21: mol_type = other RNA
actggcatctctggagtgtgt

SEQ ID NO: 221 - RNA, 21 nt, synthetic construct
  source 1..21: mol_type = other RNA
ctctggagtgtgtgggggtct

SEQ ID NO: 222 - RNA, 21 nt, synthetic construct
  source 1..21: mol_type = other RNA
gtgctgttgtctgccgtgaga

SEQ ID NO: 223 - RNA, 21 nt, synthetic construct
  source 1..21: mol_type = other RNA
tgccgtgagagcccaatcact

SEQ ID NO: 224 - RNA, 21 nt, synthetic construct
  source 1..21: mol_type = other RNA
atcactgcctatacccctcat

SEQ ID NO: 225 - RNA, 21 nt, synthetic construct
  source 1..21: mol_type = other RNA
cctcatcacacgtcacaatgt

SEQ ID NO: 226 - RNA, 21 nt, synthetic construct
  source 1..21: mol_type = other RNA
ttcccagcctcaccacccctt

SEQ ID NO: 227 - RNA, 21 nt, synthetic construct
  source 1..21: mol_type = other RNA
ccccttctcagtaatgaccct

SEQ ID NO: 228 - RNA, 21 nt, synthetic construct
  source 1..21: mol_type = other RNA
ccatactgagggtgaaattaa

SEQ ID NO: 229 - RNA, 21 nt, synthetic construct
  source 1..21: mol_type = other RNA
cccagcctctcactctcagtt

SEQ ID NO: 230 - RNA, 21 nt, synthetic construct
  source 1..21: mol_type = other RNA
atccaactgggaccctcacca

SEQ ID NO: 231 - RNA, 21 nt, synthetic construct
  source 1..21: mol_type = other RNA
tcaccacgaatctcatgatct

SEQ ID NO: 232 - RNA, 21 nt, synthetic construct
  source 1..21: mol_type = other RNA
tgatctgattcggttccctgt

SEQ ID NO: 233 - RNA, 21 nt, synthetic construct
  source 1..21: mol_type = other RNA
ctcctcccgtcacagatgtga

SEQ ID NO: 234 - RNA, 21 nt, synthetic construct
  source 1..21: mol_type = other RNA
acagatgtgagccagggcact

SEQ ID NO: 235 - RNA, 21 nt, synthetic construct
  source 1..21: mol_type = other RNA
tgctcagctgtgaccctaggt

SEQ ID NO: 236 - RNA, 21 nt, synthetic construct
  source 1..21: mol_type = other RNA
caggctgggtgtcttggttgt

SEQ ID NO: 237 - RNA, 21 nt, synthetic construct
  source 1..21: mol_type = other RNA
agtggtggcaccaggatggaa

SEQ ID NO: 238 - RNA, 21 nt, synthetic construct
  source 1..21: mol_type = other RNA
ccacttgcaccctagcttgta

SEQ ID NO: 239 - RNA, 21 nt, synthetic construct
  source 1..21: mol_type = other RNA
cttgtagctgccaacctccca

SEQ ID NO: 240 - RNA, 21 nt, synthetic construct
  source 1..21: mol_type = other RNA
tagctgccaacctcccagaca

SEQ ID NO: 241 - RNA, 21 nt, synthetic construct
  source 1..21: mol_type = other RNA
ctgctcagctccacatgcata

SEQ ID NO: 242 - RNA, 21 nt, synthetic construct
  source 1..21: mol_type = other RNA
cagccctccacacccgacaaa

SEQ ID NO: 243 - RNA, 21 nt, synthetic construct
  source 1..21: mol_type = other RNA
acacacccccttggaaatggt

SEQ ID NO: 244 - RNA, 21 nt, synthetic construct
  source 1..21: mol_type = other RNA
ttcccccagtcccagctggaa

SEQ ID NO: 245 - RNA, 21 nt, synthetic construct
  source 1..21: mol_type = other RNA
ctggaagccatgctgtctgtt

SEQ ID NO: 246 - RNA, 21 nt, synthetic construct
  source 1..21: mol_type = other RNA
cagctgaacatatacatagat

SEQ ID NO: 247 - RNA, 21 nt, synthetic construct
  source 1..21: mol_type = other RNA
cccatctgcaccctgttgagt

SEQ ID NO: 248 - RNA, 21 nt, synthetic construct
  source 1..21: mol_type = other RNA
ttgagttgtagttggatttgt

SEQ ID NO: 249 - RNA, 21 nt, synthetic construct
  source 1..21: mol_type = other RNA
atttgtctgtttatgcttgga

SEQ ID NO: 250 - RNA, 21 nt, synthetic construct
  source 1..21: mol_type = other RNA
cttggattcaccagagtgact

SEQ ID NO: 251 - RNA, 21 nt, synthetic construct
  source 1..21: mol_type = other RNA
gtgactatgatagtgaaaaga

SEQ ID NO: 252 - RNA, 21 nt, synthetic construct
  source 1..21: mol_type = other RNA
atgatagtgaaaagaaaaaaa

SEQ ID NO: 253 - RNA, 23 nt, synthetic construct
  source 1..23: mol_type = other RNA
ttgctggaatcctggtggcgttg

SEQ ID NO: 254 - RNA, 23 nt, synthetic construct
  source 1..23: mol_type = other RNA
tctttggagcgggcggggttttt

SEQ ID NO: 255 - RNA, 23 nt, synthetic construct
  source 1..23: mol_type = other RNA
attttggaggttcaccagagctg

SEQ ID NO: 256 - RNA, 23 nt, synthetic construct
  source 1..23: mol_type = other RNA
tagccgctgcgatcccctgattt

SEQ ID NO: 257 - RNA, 23 nt, synthetic construct
  source 1..23: mol_type = other RNA
tacggaccactgccaccttcttg

SEQ ID NO: 258 - RNA, 23 nt, synthetic construct
  source 1..23: mol_type = other RNA
acttgggtggagtacggaccact

SEQ ID NO: 259 - RNA, 23 nt, synthetic construct
  source 1..23: mol_type = other RNA
aagacggcgacttgggtggagta

SEQ ID NO: 260 - RNA, 23 nt, synthetic construct
  source 1..23: mol_type = other RNA
ttcttcaggtctggcatgggcac

SEQ ID NO: 261 - RNA, 23 nt, synthetic construct
  source 1..23: mol_type = other RNA
atcttggacttgacattcttcag

SEQ ID NO: 262 - RNA, 23 nt, synthetic construct
  source 1..23: mol_type = other RNA
ttctcagtggagccgatcttgga

SEQ ID NO: 263 - RNA, 23 nt, synthetic construct
  source 1..23: mol_type = other RNA
attatctgcaccttcccgcctcc

SEQ ID NO: 264 - RNA, 23 nt, synthetic construct
  source 1..23: mol_type = other RNA
tccagcttcttattaattatctg

SEQ ID NO: 265 - RNA, 23 nt, synthetic construct
  source 1..23: mol_type = other RNA
tggacgttgctaagatccagctt

SEQ ID NO: 266 - RNA, 23 nt, synthetic construct
  source 1..23: mol_type = other RNA
ttgatattatcctttgagccaca

SEQ ID NO: 267 - RNA, 23 nt, synthetic construct
  source 1..23: mol_type = other RNA
actatttgcacactgccgcctcc

SEQ ID NO: 268 - RNA, 23 nt, synthetic construct
  source 1..23: mol_type = other RNA
tcaactggtttgtagactatttg

SEQ ID NO: 269 - RNA, 23 nt, synthetic construct
  source 1..23: mol_type = other RNA
tggatgttgcctaatgagccaca

SEQ ID NO: 270 - RNA, 23 nt, synthetic construct
  source 1..23: mol_type = other RNA
tttggcgttctcgcggaaggtca

SEQ ID NO: 271 - RNA, 23 nt, synthetic construct
  source 1..23: mol_type = other RNA
tggcgacttgtacacgatctccg

SEQ ID NO: 272 - RNA, 23 nt, synthetic construct
  source 1..23: mol_type = other RNA
ttgctgagatgccgtggagacgt

SEQ ID NO: 273 - RNA, 23 nt, synthetic construct
  source 1..23: mol_type = other RNA
atgctgccggtggaggagacatt

SEQ ID NO: 274 - RNA, 23 nt, synthetic construct
  source 1..23: mol_type = other RNA
tggggcgagtctaccatgtcgat

SEQ ID NO: 275 - RNA, 23 nt, synthetic construct
  source 1..23: mol_type = other RNA
atcacaaaccctgcttggccagg

SEQ ID NO: 276 - RNA, 23 nt, synthetic construct
  source 1..23: mol_type = other RNA
acaattattgaccgccccagggg

SEQ ID NO: 277 - RNA, 23 nt, synthetic construct
  source 1..23: mol_type = other RNA
ttttccacactctctcattctct

SEQ ID NO: 278 - RNA, 23 nt, synthetic construct
  source 1..23: mol_type = other RNA
taaccgaactgcgaggagcagct

SEQ ID NO: 279 - RNA, 23 nt, synthetic construct
  source 1..23: mol_type = other RNA
aagtgattaaccaattaaccgaa

SEQ ID NO: 280 - RNA, 23 nt, synthetic construct
  source 1..23: mol_type = other RNA
tgacaaaagcaggttaagtgatt

SEQ ID NO: 281 - RNA, 23 nt, synthetic construct
  source 1..23: mol_type = other RNA
tattttattactagcccacccat

SEQ ID NO: 282 - RNA, 23 nt, synthetic construct
  source 1..23: mol_type = other RNA
tttaaatattttattactagccc

SEQ ID NO: 283 - RNA, 23 nt, synthetic construct
  source 1..23: mol_type = other RNA
aaatgttggatgtggccatgttt

SEQ ID NO: 284 - RNA, 23 nt, synthetic construct
  source 1..23: mol_type = other RNA
aggaattgcctgaggaaatgttg

SEQ ID NO: 285 - RNA, 23 nt, synthetic construct
  source 1..23: mol_type = other RNA
tacatggagggggaagaaaaaag

SEQ ID NO: 286 - RNA, 23 nt, synthetic construct
  source 1..23: mol_type = other RNA
tccttctccctcttctacatgga

SEQ ID NO: 287 - RNA, 23 nt, synthetic construct
  source 1..23: mol_type = other RNA
agctttcagagcctctccttctc

SEQ ID NO: 288 - RNA, 23 nt, synthetic construct
  source 1..23: mol_type = other RNA
aaatcccccagaagcagctttca

SEQ ID NO: 289 - RNA, 23 nt, synthetic construct
  source 1..23: mol_type = other RNA
ttggcacccccagtcccttgaaa

SEQ ID NO: 290 - RNA, 23 nt, synthetic construct
  source 1..23: mol_type = other RNA
ttgctgccactgcctctgtgaca

SEQ ID NO: 291 - RNA, 21 nt, synthetic construct
  source 1..21: mol_type = other RNA
acgccaccaggattccagcaa

SEQ ID NO: 292 - RNA, 21 nt, synthetic construct
  source 1..21: mol_type = other RNA
aaaccccgcccgctccaaaga

SEQ ID NO: 293 - RNA, 21 nt, synthetic construct
  source 1..21: mol_type = other RNA
gctctggtgaacctccaaaat

SEQ ID NO: 294 - RNA, 21 nt, synthetic construct
  source 1..21: mol_type = other RNA
atcaggggatcgcagcggcta

SEQ ID NO: 295 - RNA, 21 nt, synthetic construct
  source 1..21: mol_type = other RNA
agaaggtggcagtggtccgta

SEQ ID NO: 296 - RNA, 21 nt, synthetic construct
  source 1..21: mol_type = other RNA
tggtccgtactccacccaagt

SEQ ID NO: 297 - RNA, 21 nt, synthetic construct
  source 1..21: mol_type = other RNA
ctccacccaagtcgccgtctt

SEQ ID NO: 298 - RNA, 21 nt, synthetic construct
  source 1..21: mol_type = other RNA
gcccatgccagacctgaagaa

SEQ ID NO: 299 - RNA, 21 nt, synthetic construct
  source 1..21: mol_type = other RNA
gaagaatgtcaagtccaagat

SEQ ID NO: 300 - RNA, 21 nt, synthetic construct
  source 1..21: mol_type = other RNA
caagatcggctccactgagaa

SEQ ID NO: 301 - RNA, 21 nt, synthetic construct
  source 1..21: mol_type = other RNA
aggcgggaaggtgcagataat

SEQ ID NO: 302 - RNA, 21 nt, synthetic construct
  source 1..21: mol_type = other RNA
gataattaataagaagctgga

SEQ ID NO: 303 - RNA, 21 nt, synthetic construct
  source 1..21: mol_type = other RNA
gctggatcttagcaacgtcca

SEQ ID NO: 304 - RNA, 21 nt, synthetic construct
  source 1..21: mol_type = other RNA
tggctcaaaggataatatcaa

SEQ ID NO: 305 - RNA, 21 nt, synthetic construct
  source 1..21: mol_type = other RNA
aggcggcagtgtgcaaatagt

SEQ ID NO: 306 - RNA, 21 nt, synthetic construct
  source 1..21: mol_type = other RNA
aatagtctacaaaccagttga

SEQ ID NO: 307 - RNA, 21 nt, synthetic construct
  source 1..21: mol_type = other RNA
tggctcattaggcaacatcca

SEQ ID NO: 308 - RNA, 21 nt, synthetic construct
  source 1..21: mol_type = other RNA
accttccgcgagaacgccaaa

SEQ ID NO: 309 - RNA, 21 nt, synthetic construct
  source 1..21: mol_type = other RNA
gagatcgtgtacaagtcgcca

SEQ ID NO: 310 - RNA, 21 nt, synthetic construct
  source 1..21: mol_type = other RNA
gtctccacggcatctcagcaa

SEQ ID NO: 311 - RNA, 21 nt, synthetic construct
  source 1..21: mol_type = other RNA
tgtctcctccaccggcagcat

SEQ ID NO: 312 - RNA, 21 nt, synthetic construct
  source 1..21: mol_type = other RNA
cgacatggtagactcgcccca

SEQ ID NO: 313 - RNA, 21 nt, synthetic construct
  source 1..21: mol_type = other RNA
tggccaagcagggtttgtgat

SEQ ID NO: 314 - RNA, 21 nt, synthetic construct
  source 1..21: mol_type = other RNA
cctggggcggtcaataattgt

SEQ ID NO: 315 - RNA, 21 nt, synthetic construct
  source 1..21: mol_type = other RNA
agaatgagagagtgtggaaaa

SEQ ID NO: 316 - RNA, 21 nt, synthetic construct
  source 1..21: mol_type = other RNA
ctgctcctcgcagttcggtta

SEQ ID NO: 317 - RNA, 21 nt, synthetic construct
  source 1..21: mol_type = other RNA
cggttaattggttaatcactt

SEQ ID NO: 318 - RNA, 21 nt, synthetic construct
  source 1..21: mol_type = other RNA
tcacttaacctgcttttgtca

SEQ ID NO: 319 - RNA, 21 nt, synthetic construct
  source 1..21: mol_type = other RNA
gggtgggctagtaataaaata

SEQ ID NO: 320 - RNA, 21 nt, synthetic construct
  source 1..21: mol_type = other RNA
gctagtaataaaatatttaaa

SEQ ID NO: 321 - RNA, 21 nt, synthetic construct
  source 1..21: mol_type = other RNA
acatggccacatccaacattt

SEQ ID NO: 322 - RNA, 21 nt, synthetic construct
  source 1..21: mol_type = other RNA
acatttcctcaggcaattcct

SEQ ID NO: 323 - RNA, 21 nt, synthetic construct
  source 1..21: mol_type = other RNA
tttttcttccccctccatgta

SEQ ID NO: 324 - RNA, 21 nt, synthetic construct
  source 1..21: mol_type = other RNA
catgtagaagagggagaagga

SEQ ID NO: 325 - RNA, 21 nt, synthetic construct
  source 1..21: mol_type = other RNA
gaaggagaggctctgaaagct

SEQ ID NO: 326 - RNA, 21 nt, synthetic construct
  source 1..21: mol_type = other RNA
aaagctgcttctgggggattt

SEQ ID NO: 327 - RNA, 21 nt, synthetic construct
  source 1..21: mol_type = other RNA
tcaagggactgggggtgccaa

SEQ ID NO: 328 - RNA, 21 nt, synthetic construct
  source 1..21: mol_type = other RNA
tcacagaggcagtggcagcaa

SEQ ID NO: 329 - RNA, 23 nt, synthetic construct
  source 1..23: mol_type = other RNA
tgatagtcgacagaggcgaggac

SEQ ID NO: 330 - RNA, 23 nt, synthetic construct
  source 1..23: mol_type = other RNA
tccatcacttcgaactcctggcg

SEQ ID NO: 331 - RNA, 23 nt, synthetic construct
  source 1..23: mol_type = other RNA
tctttcctgtcccccaacccgta

SEQ ID NO: 332 - RNA, 23 nt, synthetic construct
  source 1..23: mol_type = other RNA
tggtcttggtgcatggtgtagcc

SEQ ID NO: 333 - RNA, 23 nt, synthetic construct
  source 1..23: mol_type = other RNA
tccgtgtcaccctcttggtcttg

SEQ ID NO: 334 - RNA, 23 nt, synthetic construct
  source 1..23: mol_type = other RNA
ttctttcaggccagcgtccgtgt

SEQ ID NO: 335 - RNA, 23 nt, synthetic construct
  source 1..23: mol_type = other RNA
ttcctcagatccgtcctcagtgg

SEQ ID NO: 336 - RNA, 23 nt, synthetic construct
  source 1..23: mol_type = other RNA
tccgctgttggagtgctcttagc

SEQ ID NO: 337 - RNA, 23 nt, synthetic construct
  source 1..23: mol_type = other RNA
tgaccagcagcttcgtcttccag

SEQ ID NO: 338 - RNA, 23 nt, synthetic construct
  source 1..23: mol_type = other RNA
ttgggtcacgtgaccagcagctt

SEQ ID NO: 339 - RNA, 23 nt, synthetic construct
  source 1..23: mol_type = other RNA
aactctcaactcctcttgggtca

SEQ ID NO: 340 - RNA, 23 nt, synthetic construct
  source 1..23: mol_type = other RNA
tctcattggccaggggcctttca

SEQ ID NO: 341 - RNA, 23 nt, synthetic construct
  source 1..23: mol_type = other RNA
agcttctggctctttctccccga

SEQ ID NO: 342 - RNA, 23 nt, synthetic construct
  source 1..23: mol_type = other RNA
tttttgtccccactccagggagg

SEQ ID NO: 343 - RNA, 23 nt, synthetic construct
  source 1..23: mol_type = other RNA
tgtgtggagatacgcagtggtgg

SEQ ID NO: 344 - RNA, 23 nt, synthetic construct
  source 1..23: mol_type = other RNA
accactttcaggctctgtgtgga

SEQ ID NO: 345 - RNA, 23 nt, synthetic construct
  source 1..23: mol_type = other RNA
ttcctggaccaccttaccacttt

SEQ ID NO: 346 - RNA, 23 nt, synthetic construct
  source 1..23: mol_type = other RNA
aggaagccttcctggaccacctt

SEQ ID NO: 347 - RNA, 23 nt, synthetic construct
  source 1..23: mol_type = other RNA
acatgagctggtggctcagacct

SEQ ID NO: 348 - RNA, 23 nt, synthetic construct
  source 1..23: mol_type = other RNA
aagctggtgcttgagcagctcag

SEQ ID NO: 349 - RNA, 23 nt, synthetic construct
  source 1..23: mol_type = other RNA
ttcatccacctcctccttgctcc

SEQ ID NO: 350 - RNA, 23 nt, synthetic construct
  source 1..23: mol_type = other RNA
atcgacgtcgcggtcttcatcca

SEQ ID NO: 351 - RNA, 23 nt, synthetic construct
  source 1..23: mol_type = other RNA
actcatcgacgtcgcggtcttca

SEQ ID NO: 352 - RNA, 23 nt, synthetic construct
  source 1..23: mol_type = other RNA
aggaaatccacagggagggggat

SEQ ID NO: 353 - RNA, 23 nt, synthetic construct
  source 1..23: mol_type = other RNA
tctgaggctgggatctctgtgga

SEQ ID NO: 354 - RNA, 23 nt, synthetic construct
  source 1..23: mol_type = other RNA
aaacgtgaactccaggggggcat

SEQ ID NO: 355 - RNA, 23 nt, synthetic construct
  source 1..23: mol_type = other RNA
tgtgatttccacgtgaaacgtga

SEQ ID NO: 356 - RNA, 23 nt, synthetic construct
  source 1..23: mol_type = other RNA
tgctccttctgcacgttgggtgt

SEQ ID NO: 357 - RNA, 23 nt, synthetic construct
  source 1..23: mol_type = other RNA
ttcccaaatgctcctccgagtgc

SEQ ID NO: 358 - RNA, 23 nt, synthetic construct
  source 1..23: mol_type = other RNA
ttgtgtcctctcccaaagagggg

SEQ ID NO: 359 - RNA, 23 nt, synthetic construct
  source 1..23: mol_type = other RNA
tttcagagggctctggaaggtca

SEQ ID NO: 360 - RNA, 23 nt, synthetic construct
  source 1..23: mol_type = other RNA
tttgagttgagggacccggctga

SEQ ID NO: 361 - RNA, 23 nt, synthetic construct
  source 1..23: mol_type = other RNA
actgaccatgcgagctttgagtt

SEQ ID NO: 362 - RNA, 23 nt, synthetic construct
  source 1..23: mol_type = other RNA
tgtcttggcttttttgtcatcgc

SEQ ID NO: 363 - RNA, 23 nt, synthetic construct
  source 1..23: mol_type = other RNA
agaggaacgtgtggatgtcttgg

SEQ ID NO: 364 - RNA, 23 nt, synthetic construct
  source 1..23: mol_type = other RNA
tttcaaggttttagcagaggaac

SEQ ID NO: 365 - RNA, 23 nt, synthetic construct
  source 1..23: mol_type = other RNA
aaggcaaggcctatttttcaagg

SEQ ID NO: 366 - RNA, 23 nt, synthetic construct
  source 1..23: mol_type = other RNA
tgtttggggctaaggcaaggcct

SEQ ID NO: 367 - RNA, 23 nt, synthetic construct
  source 1..23: mol_type = other RNA
aggagtggggtgtttggggctaa

SEQ ID NO: 368 - RNA, 23 nt, synthetic construct
  source 1..23: mol_type = other RNA
tgagctaccaggagtggggtgtt

SEQ ID NO: 369 - RNA, 23 nt, synthetic construct
  source 1..23: mol_type = other RNA
ttggatcagagggtctgagctac

SEQ ID NO: 370 - RNA, 23 nt, synthetic construct
  source 1..23: mol_type = other RNA
tggagggttggatcagagggtct

SEQ ID NO: 371 - RNA, 23 nt, synthetic construct
  source 1..23: mol_type = other RNA
ttaggagaggaaggtggctctgg

SEQ ID NO: 372 - RNA, 23 nt, synthetic construct
  source 1..23: mol_type = other RNA
acagaagagacgtatttaggaga

SEQ ID NO: 373 - RNA, 23 nt, synthetic construct
  source 1..23: mol_type = other RNA
tttgctccagaactgccagttcg

SEQ ID NO: 374 - RNA, 23 nt, synthetic construct
  source 1..23: mol_type = other RNA
ttgagtttcatctcctttgctcc

SEQ ID NO: 375 - RNA, 23 nt, synthetic construct
  source 1..23: mol_type = other RNA
ttaccatcagcccccttgagttt

SEQ ID NO: 376 - RNA, 21 nt, synthetic construct
  source 1..21: mol_type = other RNA
cctcgcctctgtcgactatca

SEQ ID NO: 377 - RNA, 21 nt, synthetic construct
  source 1..21: mol_type = other RNA
ccaggagttcgaagtgatgga

SEQ ID NO: 378 - RNA, 21 nt, synthetic construct
  source 1..21: mol_type = other RNA
cgggttgggggacaggaaaga

SEQ ID NO: 379 - RNA, 21 nt, synthetic construct
  source 1..21: mol_type = other RNA
ctacaccatgcaccaagacca

SEQ ID NO: 380 - RNA, 21 nt, synthetic construct
  source 1..21: mol_type = other RNA
agaccaagagggtgacacgga

SEQ ID NO: 381 - RNA, 21 nt, synthetic construct
  source 1..21: mol_type = other RNA
acggacgctggcctgaaagaa

SEQ ID NO: 382 - RNA, 21 nt, synthetic construct
  source 1..21: mol_type = other RNA
actgaggacggatctgaggaa

SEQ ID NO: 383 - RNA, 21 nt, synthetic construct
  source 1..21: mol_type = other RNA
taagagcactccaacagcgga

SEQ ID NO: 384 - RNA, 21 nt, synthetic construct
  source 1..21: mol_type = other RNA
ggaagacgaagctgctggtca

SEQ ID NO: 385 - RNA, 21 nt, synthetic construct
  source 1..21: mol_type = other RNA
gctgctggtcacgtgacccaa

SEQ ID NO: 386 - RNA, 21 nt, synthetic construct
  source 1..21: mol_type = other RNA
acccaagaggagttgagagtt

SEQ ID NO: 387 - RNA, 21 nt, synthetic construct
  source 1..21: mol_type = other RNA
aaaggcccctggccaatgaga

SEQ ID NO: 388 - RNA, 21 nt, synthetic construct
  source 1..21: mol_type = other RNA
ggggagaaagagccagaagct

SEQ ID NO: 389 - RNA, 21 nt, synthetic construct
  source 1..21: mol_type = other RNA
tccctggagtggggacaaaaa

SEQ ID NO: 390 - RNA, 21 nt, synthetic construct
  source 1..21: mol_type = other RNA
accactgcgtatctccacaca

SEQ ID NO: 391 - RNA, 21 nt, synthetic construct
  source 1..21: mol_type = other RNA
cacacagagcctgaaagtggt

SEQ ID NO: 392 - RNA, 21 nt, synthetic construct
  source 1..21: mol_type = other RNA
agtggtaaggtggtccaggaa

SEQ ID NO: 393 - RNA, 21 nt, synthetic construct
  source 1..21: mol_type = other RNA
ggtggtccaggaaggcttcct

SEQ ID NO: 394 - RNA, 21 nt, synthetic construct
  source 1..21: mol_type = other RNA
gtctgagccaccagctcatgt

SEQ ID NO: 395 - RNA, 21 nt, synthetic construct
  source 1..21: mol_type = other RNA
gagctgctcaagcaccagctt

SEQ ID NO: 396 - RNA, 21 nt, synthetic construct
  source 1..21: mol_type = other RNA
agcaaggaggaggtggatgaa

SEQ ID NO: 397 - RNA, 21 nt, synthetic construct
  source 1..21: mol_type = other RNA
gatgaagaccgcgacgtcgat

SEQ ID NO: 398 - RNA, 21 nt, synthetic construct
  source 1..21: mol_type = other RNA
aagaccgcgacgtcgatgagt

SEQ ID NO: 399 - RNA, 21 nt, synthetic construct
  source 1..21: mol_type = other RNA
ccccctccctgtggatttcct

SEQ ID NO: 400 - RNA, 21 nt, synthetic construct
  source 1..21: mol_type = other RNA
cacagagatcccagcctcaga

SEQ ID NO: 401 - RNA, 21 nt, synthetic construct
  source 1..21: mol_type = other RNA
gcccccctggagttcacgttt

SEQ ID NO: 402 - RNA, 21 nt, synthetic construct
  source 1..21: mol_type = other RNA
acgtttcacgtggaaatcaca

SEQ ID NO: 403 - RNA, 21 nt, synthetic construct
  source 1..21: mol_type = other RNA
acccaacgtgcagaaggagca

SEQ ID NO: 404 - RNA, 21 nt, synthetic construct
  source 1..21: mol_type = other RNA
actcggaggagcatttgggaa

SEQ ID NO: 405 - RNA, 21 nt, synthetic construct
  source 1..21: mol_type = other RNA
cctctttgggagaggacacaa

SEQ ID NO: 406 - RNA, 21 nt, synthetic construct
  source 1..21: mol_type = other RNA
accttccagagccctctgaaa

SEQ ID NO: 407 - RNA, 21 nt, synthetic construct
  source 1..21: mol_type = other RNA
agccgggtccctcaactcaaa

SEQ ID NO: 408 - RNA, 21 nt, synthetic construct
  source 1..21: mol_type = other RNA
ctcaaagctcgcatggtcagt

SEQ ID NO: 409 - RNA, 21 nt, synthetic construct
  source 1..21: mol_type = other RNA
gatgacaaaaaagccaagaca

SEQ ID NO: 410 - RNA, 21 nt, synthetic construct
  source 1..21: mol_type = other RNA
aagacatccacacgttcctct

SEQ ID NO: 411 - RNA, 21 nt, synthetic construct
  source 1..21: mol_type = other RNA
tcctctgctaaaaccttgaaa

SEQ ID NO: 412 - RNA, 21 nt, synthetic construct
  source 1..21: mol_type = other RNA
ttgaaaaataggccttgcctt

SEQ ID NO: 413 - RNA, 21 nt, synthetic construct
  source 1..21: mol_type = other RNA
gccttgccttagccccaaaca

SEQ ID NO: 414 - RNA, 21 nt, synthetic construct
  source 1..21: mol_type = other RNA
agccccaaacaccccactcct

SEQ ID NO: 415 - RNA, 21 nt, synthetic construct
  source 1..21: mol_type = other RNA
caccccactcctggtagctca

SEQ ID NO: 416 - RNA, 21 nt, synthetic construct
  source 1..21: mol_type = other RNA
agctcagaccctctgatccaa

SEQ ID NO: 417 - RNA, 21 nt, synthetic construct
  source 1..21: mol_type = other RNA
accctctgatccaaccctcca

SEQ ID NO: 418 - RNA, 21 nt, synthetic construct
  source 1..21: mol_type = other RNA
agagccaccttcctctcctaa

SEQ ID NO: 419 - RNA, 21 nt, synthetic construct
  source 1..21: mol_type = other RNA
tcctaaatacgtctcttctgt

SEQ ID NO: 420 - RNA, 21 nt, synthetic construct
  source 1..21: mol_type = other RNA
aactggcagttctggagcaaa

SEQ ID NO: 421 - RNA, 21 nt, synthetic construct
  source 1..21: mol_type = other RNA
agcaaaggagatgaaactcaa

SEQ ID NO: 422 - RNA, 21 nt, synthetic construct
  source 1..21: mol_type = other RNA
actcaagggggctgatggtaa

SEQ ID NO: 423 - RNA, 23 nt, synthetic construct
  source 1..23: mol_type = other RNA
aactgaagtcaatttaaatggaa

SEQ ID NO: 424 - RNA, 23 nt, synthetic construct
  source 1..23: mol_type = other RNA
aaagcaatagcaaacaggataca

SEQ ID NO: 425 - RNA, 23 nt, synthetic construct
  source 1..23: mol_type = other RNA
acccccatagcacaacaagcaat

SEQ ID NO: 426 - RNA, 23 nt, synthetic construct
  source 1..23: mol_type = other RNA
atccccccatagcacaacaagca

SEQ ID NO: 427 - RNA, 23 nt, synthetic construct
  source 1..23: mol_type = other RNA
accaagatctccctttgcccatg

SEQ ID NO: 428 - RNA, 23 nt, synthetic construct
  source 1..23: mol_type = other RNA
atttaagtgctgcaccccaagat

SEQ ID NO: 429 - RNA, 23 nt, synthetic construct
  source 1..23: mol_type = other RNA
agttgaaatcatgaaaagggtta

SEQ ID NO: 430 - RNA, 23 nt, synthetic construct
  source 1..23: mol_type = other RNA
acctctagcaaatgtggttgaaa

SEQ ID NO: 431 - RNA, 23 nt, synthetic construct
  source 1..23: mol_type = other RNA
actgctccctccctctagcaaat

SEQ ID NO: 432 - RNA, 23 nt, synthetic construct
  source 1..23: mol_type = other RNA
atcagtggaaaagagaaacccca

SEQ ID NO: 433 - RNA, 23 nt, synthetic construct
  source 1..23: mol_type = other RNA
actgggaaagcctgtcagtggaa

SEQ ID NO: 434 - RNA, 23 nt, synthetic construct
  source 1..23: mol_type = other RNA
atggctggggagggaatgaacta

SEQ ID NO: 435 - RNA, 23 nt, synthetic construct
  source 1..23: mol_type = other RNA
acaaccagatgtccatattccta

SEQ ID NO: 436 - RNA, 23 nt, synthetic construct
  source 1..23: mol_type = other RNA
acagcaggccaaagcaaccagat

SEQ ID NO: 437 - RNA, 23 nt, synthetic construct
  source 1..23: mol_type = other RNA
atgaaagagggcagcaggccaaa

SEQ ID NO: 438 - RNA, 23 nt, synthetic construct
  source 1..23: mol_type = other RNA
atgggcttaggacccctgaaaga

SEQ ID NO: 439 - RNA, 23 nt, synthetic construct
  source 1..23: mol_type = other RNA
aacagaggtgccaacggcttaga

SEQ ID NO: 440 - RNA, 23 nt, synthetic construct
  source 1..23: mol_type = other RNA
acgagtgatctcagctccaaaag

SEQ ID NO: 441 - RNA, 23 nt, synthetic construct
  source 1..23: mol_type = other RNA
aatgaggagggtgaagcgagtga

SEQ ID NO: 442 - RNA, 23 nt, synthetic construct
  source 1..23: mol_type = other RNA
acgacctcgtggctttacttgga

SEQ ID NO: 443 - RNA, 23 nt, synthetic construct
  source 1..23: mol_type = other RNA
actgcaggtctgtagatgggaca

SEQ ID NO: 444 - RNA, 23 nt, synthetic construct
  source 1..23: mol_type = other RNA
aagaagttttatgaagctgcagg

SEQ ID NO: 445 - RNA, 23 nt, synthetic construct
  source 1..23: mol_type = other RNA
aggtaacccttttcaaagctgaa

SEQ ID NO: 446 - RNA, 23 nt, synthetic construct
  source 1..23: mol_type = other RNA
acagtgcccagggtaaccctttt

SEQ ID NO: 447 - RNA, 23 nt, synthetic construct
  source 1..23: mol_type = other RNA
aaacatggcaaactcatggggct

SEQ ID NO: 448 - RNA, 23 nt, synthetic construct
  source 1..23: mol_type = other RNA
agacttgcaagtgccagaaatag

SEQ ID NO: 449 - RNA, 23 nt, synthetic construct
  source 1..23: mol_type = other RNA
accaccctcagaattaccgaaga

SEQ ID NO: 450 - RNA, 23 nt, synthetic construct
  source 1..23: mol_type = other RNA
accccaccctcagaattaccgaa

SEQ ID NO: 451 - RNA, 23 nt, synthetic construct
  source 1..23: mol_type = other RNA
aacattcacagacagaaagctaa

SEQ ID NO: 452 - RNA, 23 nt, synthetic construct
  source 1..23: mol_type = other RNA
aatttgttaaaacacacaataca

SEQ ID NO: 453 - RNA, 21 nt, synthetic construct
  source 1..21: mol_type = other RNA
ccatttaaattgacttcagtt

SEQ ID NO: 454 - RNA, 21 nt, synthetic construct
  source 1..21: mol_type = other RNA
tatcctgtttgctattgcttt

SEQ ID NO: 455 - RNA, 21 nt, synthetic construct
  source 1..21: mol_type = other RNA
tgcttgttgtgctatgggggt

SEQ ID NO: 456 - RNA, 21 nt, synthetic construct
  source 1..21: mol_type = other RNA
cttgttgtgctatggggggat

SEQ ID NO: 457 - RNA, 21 nt, synthetic construct
  source 1..21: mol_type = other RNA
tgggcaaagggagatcttggt

SEQ ID NO: 458 - RNA, 21 nt, synthetic construct
  source 1..21: mol_type = other RNA
cttggggtgcagcacttaaat

SEQ ID NO: 459 - RNA, 21 nt, synthetic construct
  source 1..21: mol_type = other RNA
acccttttcatgatttcaact

SEQ ID NO: 460 - RNA, 21 nt, synthetic construct
  source 1..21: mol_type = other RNA
tcaaccacatttgctagaggt

SEQ ID NO: 461 - RNA, 21 nt, synthetic construct
  source 1..21: mol_type = other RNA
ttgctagagggagggagcagt

SEQ ID NO: 462 - RNA, 21 nt, synthetic construct
  source 1..21: mol_type = other RNA
gggtttctcttttccactgat

SEQ ID NO: 463 - RNA, 21 nt, synthetic construct
  source 1..21: mol_type = other RNA
ccactgacaggctttcccagt

SEQ ID NO: 464 - RNA, 21 nt, synthetic construct
  source 1..21: mol_type = other RNA
gttcattccctccccagccat

SEQ ID NO: 465 - RNA, 21 nt, synthetic construct
  source 1..21: mol_type = other RNA
ggaatatggacatctggttgt

SEQ ID NO: 466 - RNA, 21 nt, synthetic construct
  source 1..21: mol_type = other RNA
ctggttgctttggcctgctgt

SEQ ID NO: 467 - RNA, 21 nt, synthetic construct
  source 1..21: mol_type = other RNA
tggcctgctgccctctttcat

SEQ ID NO: 468 - RNA, 21 nt, synthetic construct
  source 1..21: mol_type = other RNA
tttcaggggtcctaagcccat

SEQ ID NO: 469 - RNA, 21 nt, synthetic construct
  source 1..21: mol_type = other RNA
taagccgttggcacctctgtt

SEQ ID NO: 470 - RNA, 21 nt, synthetic construct
  source 1..21: mol_type = other RNA
tttggagctgagatcactcgt

SEQ ID NO: 471 - RNA, 21 nt, synthetic construct
  source 1..21: mol_type = other RNA
actcgcttcaccctcctcatt

SEQ ID NO: 472 - RNA, 21 nt, synthetic construct
  source 1..21: mol_type = other RNA
caagtaaagccacgaggtcgt

SEQ ID NO: 473 - RNA, 21 nt, synthetic construct
  source 1..21: mol_type = other RNA
tcccatctacagacctgcagt

SEQ ID NO: 474 - RNA, 21 nt, synthetic construct
  source 1..21: mol_type = other RNA
tgcagcttcataaaacttctt

SEQ ID NO: 475 - RNA, 21 nt, synthetic construct
  source 1..21: mol_type = other RNA
cagctttgaaaagggttacct

SEQ ID NO: 476 - RNA, 21 nt, synthetic construct
  source 1..21: mol_type = other RNA
aagggttaccctgggcactgt

SEQ ID NO: 477 - RNA, 21 nt, synthetic construct
  source 1..21: mol_type = other RNA
ccccatgagtttgccatgttt

SEQ ID NO: 478 - RNA, 21 nt, synthetic construct
  source 1..21: mol_type = other RNA
atttctggcacttgcaagtct

SEQ ID NO: 479 - RNA, 21 nt, synthetic construct
  source 1..21: mol_type = other RNA
ttcggtaattctgagggtggt

SEQ ID NO: 480 - RNA, 21 nt, synthetic construct
  source 1..21: mol_type = other RNA
cggtaattctgagggtggggt

SEQ ID NO: 481 - RNA, 21 nt, synthetic construct
  source 1..21: mol_type = other RNA
agctttctgtctgtgaatgtt

SEQ ID NO: 482 - RNA, 21 nt, synthetic construct
  source 1..21: mol_type = other RNA
tattgtgtgttttaacaaatt

SEQ ID NO: 483 - RNA, 23 nt, synthetic construct
  source 1..23: mol_type = other RNA
atgagggtgggttagaaacctct

SEQ ID NO: 484 - RNA, 23 nt, synthetic construct
  source 1..23: mol_type = other RNA
actgaggaaagcctttcaaaact

SEQ ID NO: 485 - RNA, 23 nt, synthetic construct
  source 1..23: mol_type = other RNA
acctccttagctgctagaagctg

SEQ ID NO: 486 - RNA, 23 nt, synthetic construct
  source 1..23: mol_type = other RNA
atcacagctgaacggcctcctta

SEQ ID NO: 487 - RNA, 23 nt, synthetic construct
  source 1..23: mol_type = other RNA
agggacatcatcgcttcagtcct

SEQ ID NO: 488 - RNA, 23 nt, synthetic construct
  source 1..23: mol_type = other RNA
actttgggactgccatgagactt

SEQ ID NO: 489 - RNA, 23 nt, synthetic construct
  source 1..23: mol_type = other RNA
atggcagtggcttcctttttctt

SEQ ID NO: 490 - RNA, 23 nt, synthetic construct
  source 1..23: mol_type = other RNA
acagctggcagtggcttcctttt

SEQ ID NO: 491 - RNA, 23 nt, synthetic construct
  source 1..23: mol_type = other RNA
aagcttggagaggaacccagtct

SEQ ID NO: 492 - RNA, 23 nt, synthetic construct
  source 1..23: mol_type = other RNA
acctctagagcagatccaggaca

SEQ ID NO: 493 - RNA, 23 nt, synthetic construct
  source 1..23: mol_type = other RNA
aagcttgggcctctagagcagat

SEQ ID NO: 494 - RNA, 23 nt, synthetic construct
  source 1..23: mol_type = other RNA
atgacttgtcaagtcatccttcc

SEQ ID NO: 495 - RNA, 23 nt, synthetic construct
  source 1..23: mol_type = other RNA
atctggtcaaggctttgggaaca

SEQ ID NO: 496 - RNA, 23 nt, synthetic construct
  source 1..23: mol_type = other RNA
atgaggtgctctggtcaaggctt

SEQ ID NO: 497 - RNA, 23 nt, synthetic construct
  source 1..23: mol_type = other RNA
acttcccttttctcatggcagca

SEQ ID NO: 498 - RNA, 23 nt, synthetic construct
  source 1..23: mol_type = other RNA
atgaggctgctgagtttctttag

SEQ ID NO: 499 - RNA, 23 nt, synthetic construct
  source 1..23: mol_type = other RNA
aaaaccagaagtggcagaattgg

SEQ ID NO: 500 - RNA, 23 nt, synthetic construct
  source 1..23: mol_type = other RNA
acctttaactgtacccaaaccag

SEQ ID NO: 501 - RNA, 23 nt, synthetic construct
  source 1..23: mol_type = other RNA
actttcaggtaaagctctagctg

SEQ ID NO: 502 - RNA, 23 nt, synthetic construct
  source 1..23: mol_type = other RNA
aagagttctgggcccagagactt

SEQ ID NO: 503 - RNA, 23 nt, synthetic construct
  source 1..23: mol_type = other RNA
agaggctcttggtggagagttct

SEQ ID NO: 504 - RNA, 23 nt, synthetic construct
  source 1..23: mol_type = other RNA
acttcaacttaggagaattgctg

SEQ ID NO: 505 - RNA, 23 nt, synthetic construct
  source 1..23: mol_type = other RNA
agggggcatatctctaaccacca

SEQ ID NO: 506 - RNA, 23 nt, synthetic construct
  source 1..23: mol_type = other RNA
acgaggtgcgtgaagaaatgcag

SEQ ID NO: 507 - RNA, 23 nt, synthetic construct
  source 1..23: mol_type = other RNA
attcaggaagaggaaccgaggtg

SEQ ID NO: 508 - RNA, 23 nt, synthetic construct
  source 1..23: mol_type = other RNA
agtataagaaggcccatggtgct

SEQ ID NO: 509 - RNA, 23 nt, synthetic construct
  source 1..23: mol_type = other RNA
aatcccagagccttccgtataag

SEQ ID NO: 510 - RNA, 23 nt, synthetic construct
  source 1..23: mol_type = other RNA
agagatcccagagccttccgtat

SEQ ID NO: 511 - RNA, 23 nt, synthetic construct
  source 1..23: mol_type = other RNA
aatcaccctaaaccatgatctta

SEQ ID NO: 512 - RNA, 23 nt, synthetic construct
  source 1..23: mol_type = other RNA
acgtgccttttcaatttatctgc

SEQ ID NO: 513 - RNA, 23 nt, synthetic construct
  source 1..23: mol_type = other RNA
aggattgtcctcatttaagatca

SEQ ID NO: 514 - RNA, 23 nt, synthetic construct
  source 1..23: mol_type = other RNA
acctggggggattgtcctcattt

SEQ ID NO: 515 - RNA, 23 nt, synthetic construct
  source 1..23: mol_type = other RNA
aatacagtatatcctatctagcc

SEQ ID NO: 516 - RNA, 23 nt, synthetic construct
  source 1..23: mol_type = other RNA
acttgaaggagccggcatacagt

SEQ ID NO: 517 - RNA, 21 nt, synthetic construct
  source 1..21: mol_type = other RNA
aggtttctaacccaccctcat

SEQ ID NO: 518 - RNA, 21 nt, synthetic construct
  source 1..21: mol_type = other RNA
ttttgaaaggctttcctcagt

SEQ ID NO: 519 - RNA, 21 nt, synthetic construct
  source 1..21: mol_type = other RNA
gcttctagcagctaaggaggt

SEQ ID NO: 520 - RNA, 21 nt, synthetic construct
  source 1..21: mol_type = other RNA
aggaggccgttcagctgtgat

SEQ ID NO: 521 - RNA, 21 nt, synthetic construct
  source 1..21: mol_type = other RNA
gactgaagcgatgatgtccct

SEQ ID NO: 522 - RNA, 21 nt, synthetic construct
  source 1..21: mol_type = other RNA
gtctcatggcagtcccaaagt

SEQ ID NO: 523 - RNA, 21 nt, synthetic construct
  source 1..21: mol_type = other RNA
gaaaaaggaagccactgccat

SEQ ID NO: 524 - RNA, 21 nt, synthetic construct
  source 1..21: mol_type = other RNA
aaggaagccactgccagctgt

SEQ ID NO: 525 - RNA, 21 nt, synthetic construct
  source 1..21: mol_type = other RNA
actgggttcctctccaagctt

SEQ ID NO: 526 - RNA, 21 nt, synthetic construct
  source 1..21: mol_type = other RNA
tcctggatctgctctagaggt

SEQ ID NO: 527 - RNA, 21 nt, synthetic construct
  source 1..21: mol_type = other RNA
ctgctctagaggcccaagctt

SEQ ID NO: 528 - RNA, 21 nt, synthetic construct
  source 1..21: mol_type = other RNA
aaggatgacttgacaagtcat

SEQ ID NO: 529 - RNA, 21 nt, synthetic construct
  source 1..21: mol_type = other RNA
ttcccaaagccttgaccagat

SEQ ID NO: 530 - RNA, 21 nt, synthetic construct
  source 1..21: mol_type = other RNA
gccttgaccagagcacctcat

SEQ ID NO: 531 - RNA, 21 nt, synthetic construct
  source 1..21: mol_type = other RNA
ctgccatgagaaaagggaagt

SEQ ID NO: 532 - RNA, 21 nt, synthetic construct
  source 1..21: mol_type = other RNA
aaagaaactcagcagcctcat

SEQ ID NO: 533 - RNA, 21 nt, synthetic construct
  source 1..21: mol_type = other RNA
aattctgccacttctggtttt

SEQ ID NO: 534 - RNA, 21 nt, synthetic construct
  source 1..21: mol_type = other RNA
ggtttgggtacagttaaaggt

SEQ ID NO: 535 - RNA, 21 nt, synthetic construct
  source 1..21: mol_type = other RNA
gctagagctttacctgaaagt

SEQ ID NO: 536 - RNA, 21 nt, synthetic construct
  source 1..21: mol_type = other RNA
gtctctgggcccagaactctt

SEQ ID NO: 537 - RNA, 21 nt, synthetic construct
  source 1..21: mol_type = other RNA
aactctccaccaagagcctct

SEQ ID NO: 538 - RNA, 21 nt, synthetic construct
  source 1..21: mol_type = other RNA
gcaattctcctaagttgaagt

SEQ ID NO: 539 - RNA, 21 nt, synthetic construct
  source 1..21: mol_type = other RNA
gtggttagagatatgccccct

SEQ ID NO: 540 - RNA, 21 nt, synthetic construct
  source 1..21: mol_type = other RNA
gcatttcttcacgcacctcgt

SEQ ID NO: 541 - RNA, 21 nt, synthetic construct
  source 1..21: mol_type = other RNA
cctcggttcctcttcctgaat

SEQ ID NO: 542 - RNA, 21 nt, synthetic construct
  source 1..21: mol_type = other RNA
caccatgggccttcttatact

SEQ ID NO: 543 - RNA, 21 nt, synthetic construct
  source 1..21: mol_type = other RNA
tatacggaaggctctgggatt

SEQ ID NO: 544 - RNA, 21 nt, synthetic construct
  source 1..21: mol_type = other RNA
acggaaggctctgggatctct

SEQ ID NO: 545 - RNA, 21 nt, synthetic construct
  source 1..21: mol_type = other RNA
agatcatggtttagggtgatt

SEQ ID NO: 546 - RNA, 21 nt, synthetic construct
  source 1..21: mol_type = other RNA
agataaattgaaaaggcacgt

SEQ ID NO: 547 - RNA, 21 nt, synthetic construct
  source 1..21: mol_type = other RNA
atcttaaatgaggacaatcct

SEQ ID NO: 548 - RNA, 21 nt, synthetic construct
  source 1..21: mol_type = other RNA
atgaggacaatccccccaggt

SEQ ID NO: 549 - RNA, 21 nt, synthetic construct
  source 1..21: mol_type = other RNA
ctagataggatatactgtatt

SEQ ID NO: 550 - RNA, 21 nt, synthetic construct
  source 1..21: mol_type = other RNA
tgtatgccggctccttcaagt

SEQ ID NO: 551 - RNA, 23 nt, synthetic construct
  source 1..23: mol_type = other RNA
attgacatcgtctgcctgtggct

SEQ ID NO: 552 - RNA, 23 nt, synthetic construct
  source 1..23: mol_type = other RNA
aaacccccgtcacactcacacaa

SEQ ID NO: 553 - RNA, 23 nt, synthetic construct
  source 1..23: mol_type = other RNA
attcctctcccactcccacttct

SEQ ID NO: 554 - RNA, 23 nt, synthetic construct
  source 1..23: mol_type = other RNA
acaaggagggggatgtctactct

SEQ ID NO: 555 - RNA, 23 nt, synthetic construct
  source 1..23: mol_type = other RNA
atcctgccagcttgccttctctt

SEQ ID NO: 556 - RNA, 23 nt, synthetic construct
  source 1..23: mol_type = other RNA
agtcagtcttttctaaggaggtc

SEQ ID NO: 557 - RNA, 23 nt, synthetic construct
  source 1..23: mol_type = other RNA
atctcaagacatcaaggtcagtc

SEQ ID NO: 558 - RNA, 23 nt, synthetic construct
  source 1..23: mol_type = other RNA
atcaataaaacagggtttctgtg

SEQ ID NO: 559 - RNA, 23 nt, synthetic construct
  source 1..23: mol_type = other RNA
acctaaagtcccaggtctgcaaa

SEQ ID NO: 560 - RNA, 23 nt, synthetic construct
  source 1..23: mol_type = other RNA
acacaagtccttacaaagagaac

SEQ ID NO: 561 - RNA, 23 nt, synthetic construct
  source 1..23: mol_type = other RNA
aacgtctcccaagaggcacaagt

SEQ ID NO: 562 - RNA, 23 nt, synthetic construct
  source 1..23: mol_type = other RNA
agctgggaattcgggacattgtg

SEQ ID NO: 563 - RNA, 23 nt, synthetic construct
  source 1..23: mol_type = other RNA
atcctgcaaccaaccagggtcat

SEQ ID NO: 564 - RNA, 23 nt, synthetic construct
  source 1..23: mol_type = other RNA
atatggagtaggtacctcctgca

SEQ ID NO: 565 - RNA, 23 nt, synthetic construct
  source 1..23: mol_type = other RNA
agactttgccttcccttaatttc

SEQ ID NO: 566 - RNA, 23 nt, synthetic construct
  source 1..23: mol_type = other RNA
accactcttgtgcctggactttg

SEQ ID NO: 567 - RNA, 23 nt, synthetic construct
  source 1..23: mol_type = other RNA
atcccactcttgtgcctggactt

SEQ ID NO: 568 - RNA, 23 nt, synthetic construct
  source 1..23: mol_type = other RNA
aagttggatgagtggaactgaga

SEQ ID NO: 569 - RNA, 23 nt, synthetic construct
  source 1..23: mol_type = other RNA
aaggaggagacagggaaccgaat

SEQ ID NO: 570 - RNA, 23 nt, synthetic construct
  source 1..23: mol_type = other RNA
aaacaaggcagaaacacctaggg

SEQ ID NO: 571 - RNA, 23 nt, synthetic construct
  source 1..23: mol_type = other RNA
aggctctctccatgtcaacaagg

SEQ ID NO: 572 - RNA, 23 nt, synthetic construct
  source 1..23: mol_type = other RNA
attctcaggggaaagggctctct

SEQ ID NO: 573 - RNA, 23 nt, synthetic construct
  source 1..23: mol_type = other RNA
atggtgccaccactgacaaccaa

SEQ ID NO: 574 - RNA, 23 nt, synthetic construct
  source 1..23: mol_type = other RNA
atggagggctgatactatgcatg

SEQ ID NO: 575 - RNA, 23 nt, synthetic construct
  source 1..23: mol_type = other RNA
atgtgttcccctttgtcgggtgt

SEQ ID NO: 576 - RNA, 23 nt, synthetic construct
  source 1..23: mol_type = other RNA
aactgggggaaaagaaccatttc

SEQ ID NO: 577 - RNA, 23 nt, synthetic construct
  source 1..23: mol_type = other RNA
aagctgctccagcagaacagaca

SEQ ID NO: 578 - RNA, 23 nt, synthetic construct
  source 1..23: mol_type = other RNA
agagggcagggcaacatctatgt

SEQ ID NO: 579 - RNA, 23 nt, synthetic construct
  source 1..23: mol_type = other RNA
acgtccttttttttttttttttt

SEQ ID NO: 580 - RNA, 23 nt, synthetic construct
  source 1..23: mol_type = other RNA
aatttcaagatacatgcgtcctt

SEQ ID NO: 581 - RNA, 21 nt, synthetic construct
  source 1..21: mol_type = other RNA
ccacaggcagacgatgtcaat

SEQ ID NO: 582 - RNA, 21 nt, synthetic construct
  source 1..21: mol_type = other RNA
gtgtgagtgtgacgggggttt

SEQ ID NO: 583 - RNA, 21 nt, synthetic construct
  source 1..21: mol_type = other RNA
aagtgggagtgggagaggaat

SEQ ID NO: 584 - RNA, 21 nt, synthetic construct
  source 1..21: mol_type = other RNA
agtagacatccccctccttgt

SEQ ID NO: 585 - RNA, 21 nt, synthetic construct
  source 1..21: mol_type = other RNA
gagaaggcaagctggcaggat

SEQ ID NO: 586 - RNA, 21 nt, synthetic construct
  source 1..21: mol_type = other RNA
cctccttagaaaagactgact

SEQ ID NO: 587 - RNA, 21 nt, synthetic construct
  source 1..21: mol_type = other RNA
ctgaccttgatgtcttgagat

SEQ ID NO: 588 - RNA, 21 nt, synthetic construct
  source 1..21: mol_type = other RNA
cagaaaccctgttttattgat

SEQ ID NO: 589 - RNA, 21 nt, synthetic construct
  source 1..21: mol_type = other RNA
tgcagacctgggactttaggt

SEQ ID NO: 590 - RNA, 21 nt, synthetic construct
  source 1..21: mol_type = other RNA
tctctttgtaaggacttgtgt

SEQ ID NO: 591 - RNA, 21 nt, synthetic construct
  source 1..21: mol_type = other RNA
ttgtgcctcttgggagacgtt

SEQ ID NO: 592 - RNA, 21 nt, synthetic construct
  source 1..21: mol_type = other RNA
caatgtcccgaattcccagct

SEQ ID NO: 593 - RNA, 21 nt, synthetic construct
  source 1..21: mol_type = other RNA
gaccctggttggttgcaggat

SEQ ID NO: 594 - RNA, 21 nt, synthetic construct
  source 1..21: mol_type = other RNA
caggaggtacctactccatat

SEQ ID NO: 595 - RNA, 21 nt, synthetic construct
  source 1..21: mol_type = other RNA
aattaagggaaggcaaagtct

SEQ ID NO: 596 - RNA, 21 nt, synthetic construct
  source 1..21: mol_type = other RNA
aagtccaggcacaagagtggt

SEQ ID NO: 597 - RNA, 21 nt, synthetic construct
  source 1..21: mol_type = other RNA
gtccaggcacaagagtgggat

SEQ ID NO: 598 - RNA, 21 nt, synthetic construct
  source 1..21: mol_type = other RNA
tcagttccactcatccaactt

SEQ ID NO: 599 - RNA, 21 nt, synthetic construct
  source 1..21: mol_type = other RNA
tcggttccctgtctcctcctt

SEQ ID NO: 600 - RNA, 21 nt, synthetic construct
  source 1..21: mol_type = other RNA
ctaggtgtttctgccttgttt

SEQ ID NO: 601 - RNA, 21 nt, synthetic construct
  source 1..21: mol_type = other RNA
ttgttgacatggagagagcct

SEQ ID NO: 602 - RNA, 21 nt, synthetic construct
  source 1..21: mol_type = other RNA
agagccctttcccctgagaat

SEQ ID NO: 603 - RNA, 21 nt, synthetic construct
  source 1..21: mol_type = other RNA
ggttgtcagtggtggcaccat

SEQ ID NO: 604 - RNA, 21 nt, synthetic construct
  source 1..21: mol_type = other RNA
tgcatagtatcagccctccat

SEQ ID NO: 605 - RNA, 21 nt, synthetic construct
  source 1..21: mol_type = other RNA
acccgacaaaggggaacacat

SEQ ID NO: 606 - RNA, 21 nt, synthetic construct
  source 1..21: mol_type = other RNA
aatggttcttttcccccagtt

SEQ ID NO: 607 - RNA, 21 nt, synthetic construct
  source 1..21: mol_type = other RNA
tctgttctgctggagcagctt

SEQ ID NO: 608 - RNA, 21 nt, synthetic construct
  source 1..21: mol_type = other RNA
atagatgttgccctgccctct

SEQ ID NO: 609 - RNA, 21 nt, synthetic construct
  source 1..21: mol_type = other RNA
aaaaaaaaaaaaaaaggacgt

SEQ ID NO: 610 - RNA, 21 nt, synthetic construct
  source 1..21: mol_type = other RNA
ggacgcatgtatcttgaaatt

SEQ ID NO: 611 - RNA, 23 nt, synthetic construct
  source 1..23: mol_type = other RNA
agcggtgtggcgatcttcgtttt

SEQ ID NO: 612 - RNA, 23 nt, synthetic construct
  source 1..23: mol_type = other RNA
agcggggtttttgctggaatcct

SEQ ID NO: 613 - RNA, 23 nt, synthetic construct
  source 1..23: mol_type = other RNA
aagagctgggtggtgtctttgga

SEQ ID NO: 614 - RNA, 23 nt, synthetic construct
  source 1..23: mol_type = other RNA
agctgcgatcccctgattttgga

SEQ ID NO: 615 - RNA, 23 nt, synthetic construct
  source 1..23: mol_type = other RNA
agctggtgcttcaggttctcagt

SEQ ID NO: 616 - RNA, 23 nt, synthetic construct
  source 1..23: mol_type = other RNA
aagccacacttggactggacgtt

SEQ ID NO: 617 - RNA, 23 nt, synthetic construct
  source 1..23: mol_type = other RNA
actcccgggacgtgtttgatatt

SEQ ID NO: 618 - RNA, 23 nt, synthetic construct
  source 1..23: mol_type = other RNA
acctcccgggacgtgtttgatat

SEQ ID NO: 619 - RNA, 23 nt, synthetic construct
  source 1..23: mol_type = other RNA
atcaccttgctcaggtcaactgg

SEQ ID NO: 620 - RNA, 23 nt, synthetic construct
  source 1..23: mol_type = other RNA
aagccacacttggaggtcacctt

SEQ ID NO: 621 - RNA, 23 nt, synthetic construct
  source 1..23: mol_type = other RNA
actcctggtttatgatggatgtt

SEQ ID NO: 622 - RNA, 23 nt, synthetic construct
  source 1..23: mol_type = other RNA
aacctggccacctcctggtttat

SEQ ID NO: 623 - RNA, 23 nt, synthetic construct
  source 1..23: mol_type = other RNA
atcagattttacttccacctggc

SEQ ID NO: 624 - RNA, 23 nt, synthetic construct
  source 1..23: mol_type = other RNA
attgaagtcaagcttctcagatt

SEQ ID NO: 625 - RNA, 23 nt, synthetic construct
  source 1..23: mol_type = other RNA
agactggactctgtccttgaagt

SEQ ID NO: 626 - RNA, 23 nt, synthetic construct
  source 1..23: mol_type = other RNA
aagggacccaatcttcgactgga

SEQ ID NO: 627 - RNA, 23 nt, synthetic construct
  source 1..23: mol_type = other RNA
atgggtgatattgtccagggacc

SEQ ID NO: 628 - RNA, 23 nt, synthetic construct
  source 1..23: mol_type = other RNA
accagggacgtgggtgatattgt

SEQ ID NO: 629 - RNA, 23 nt, synthetic construct
  source 1..23: mol_type = other RNA
atttttatttcctccgccaggga

SEQ ID NO: 630 - RNA, 23 nt, synthetic construct
  source 1..23: mol_type = other RNA
attgtgggtttcaatctttttat

SEQ ID NO: 631 - RNA, 23 nt, synthetic construct
  source 1..23: mol_type = other RNA
acggaaggtcagcttgtgggttt

SEQ ID NO: 632 - RNA, 23 nt, synthetic construct
  source 1..23: mol_type = other RNA
atggtctgtcttggctttggcgt

SEQ ID NO: 633 - RNA, 23 nt, synthetic construct
  source 1..23: mol_type = other RNA
acagacaccactggcgacttgta

SEQ ID NO: 634 - RNA, 23 nt, synthetic construct
  source 1..23: mol_type = other RNA
aggtggaggagacattgctgaga

SEQ ID NO: 635 - RNA, 23 nt, synthetic construct
  source 1..23: mol_type = other RNA
aagtctaccatgtcgatgctgcc

SEQ ID NO: 636 - RNA, 23 nt, synthetic construct
  source 1..23: mol_type = other RNA
aggcctgatcacaaaccctgctt

SEQ ID NO: 637 - RNA, 23 nt, synthetic construct
  source 1..23: mol_type = other RNA
aattctctcctctccacaattat

SEQ ID NO: 638 - RNA, 23 nt, synthetic construct
  source 1..23: mol_type = other RNA
atcattattctttttttttccac

SEQ ID NO: 639 - RNA, 23 nt, synthetic construct
  source 1..23: mol_type = other RNA
agggggccgggtcattattcttt

SEQ ID NO: 640 - RNA, 23 nt, synthetic construct
  source 1..23: mol_type = other RNA
agagccaaagccgagtgacaaaa

SEQ ID NO: 641 - RNA, 23 nt, synthetic construct
  source 1..23: mol_type = other RNA
atgattttgaagtcccgagccaa

SEQ ID NO: 642 - RNA, 23 nt, synthetic construct
  source 1..23: mol_type = other RNA
atcttactcccatcactgatttt

SEQ ID NO: 643 - RNA, 23 nt, synthetic construct
  source 1..23: mol_type = other RNA
aaaagatgaaatttgctcttact

SEQ ID NO: 644 - RNA, 23 nt, synthetic construct
  source 1..23: mol_type = other RNA
acacccatcaatttggaaagatg

SEQ ID NO: 645 - RNA, 23 nt, synthetic construct
  source 1..23: mol_type = other RNA
acatgtttttgaatgtttttttt

SEQ ID NO: 646 - RNA, 23 nt, synthetic construct
  source 1..23: mol_type = other RNA
aaaaaaagaatcaaaaggaattg

SEQ ID NO: 647 - RNA, 23 nt, synthetic construct
  source 1..23: mol_type = other RNA
acagtcccttgaaatcccccaga

SEQ ID NO: 648 - RNA, 23 nt, synthetic construct
  source 1..23: mol_type = other RNA
atttcaaatcctttgttgctgcc

SEQ ID NO: 649 - RNA, 23 nt, synthetic construct
  source 1..23: mol_type = other RNA
acacgaacacaccaagtttcaaa

SEQ ID NO: 650 - RNA, 23 nt, synthetic construct
  source 1..23: mol_type = other RNA
atgtggctccacgaacacaccaa

SEQ ID NO: 651 - RNA, 21 nt, synthetic construct
  source 1..21: mol_type = other RNA
aacgaagatcgccacaccgct

SEQ ID NO: 652 - RNA, 21 nt, synthetic construct
  source 1..21: mol_type = other RNA
gattccagcaaaaaccccgct

SEQ ID NO: 653 - RNA, 21 nt, synthetic construct
  source 1..21: mol_type = other RNA
caaagacaccacccagctctt

SEQ ID NO: 654 - RNA, 21 nt, synthetic construct
  source 1..21: mol_type = other RNA
caaaatcaggggatcgcagct

SEQ ID NO: 655 - RNA, 21 nt, synthetic construct
  source 1..21: mol_type = other RNA
tgagaacctgaagcaccagct

SEQ ID NO: 656 - RNA, 21 nt, synthetic construct
  source 1..21: mol_type = other RNA
cgtccagtccaagtgtggctt

SEQ ID NO: 657 - RNA, 21 nt, synthetic construct
  source 1..21: mol_type = other RNA
tatcaaacacgtcccgggagt

SEQ ID NO: 658 - RNA, 21 nt, synthetic construct
  source 1..21: mol_type = other RNA
atcaaacacgtcccgggaggt

SEQ ID NO: 659 - RNA, 21 nt, synthetic construct
  source 1..21: mol_type = other RNA
agttgacctgagcaaggtgat

SEQ ID NO: 660 - RNA, 21 nt, synthetic construct
  source 1..21: mol_type = other RNA
ggtgacctccaagtgtggctt

SEQ ID NO: 661 - RNA, 21 nt, synthetic construct
  source 1..21: mol_type = other RNA
catccatcataaaccaggagt

SEQ ID NO: 662 - RNA, 21 nt, synthetic construct
  source 1..21: mol_type = other RNA
aaaccaggaggtggccaggtt

SEQ ID NO: 663 - RNA, 21 nt, synthetic construct
  source 1..21: mol_type = other RNA
caggtggaagtaaaatctgat

SEQ ID NO: 664 - RNA, 21 nt, synthetic construct
  source 1..21: mol_type = other RNA
tctgagaagcttgacttcaat

SEQ ID NO: 665 - RNA, 21 nt, synthetic construct
  source 1..21: mol_type = other RNA
ttcaaggacagagtccagtct

SEQ ID NO: 666 - RNA, 21 nt, synthetic construct
  source 1..21: mol_type = other RNA
cagtcgaagattgggtccctt

SEQ ID NO: 667 - RNA, 21 nt, synthetic construct
  source 1..21: mol_type = other RNA
tccctggacaatatcacccat

SEQ ID NO: 668 - RNA, 21 nt, synthetic construct
  source 1..21: mol_type = other RNA
aatatcacccacgtccctggt

SEQ ID NO: 669 - RNA, 21 nt, synthetic construct
  source 1..21: mol_type = other RNA
cctggcggaggaaataaaaat

SEQ ID NO: 670 - RNA, 21 nt, synthetic construct
  source 1..21: mol_type = other RNA
aaaaagattgaaacccacaat

SEQ ID NO: 671 - RNA, 21 nt, synthetic construct
  source 1..21: mol_type = other RNA
acccacaagctgaccttccgt

SEQ ID NO: 672 - RNA, 21 nt, synthetic construct
  source 1..21: mol_type = other RNA
gccaaagccaagacagaccat

SEQ ID NO: 673 - RNA, 21 nt, synthetic construct
  source 1..21: mol_type = other RNA
caagtcgccagtggtgtctgt

SEQ ID NO: 674 - RNA, 21 nt, synthetic construct
  source 1..21: mol_type = other RNA
tcagcaatgtctcctccacct

SEQ ID NO: 675 - RNA, 21 nt, synthetic construct
  source 1..21: mol_type = other RNA
cagcatcgacatggtagactt

SEQ ID NO: 676 - RNA, 21 nt, synthetic construct
  source 1..21: mol_type = other RNA
gcagggtttgtgatcaggcct

SEQ ID NO: 677 - RNA, 21 nt, synthetic construct
  source 1..21: mol_type = other RNA
aattgtggagaggagagaatt

SEQ ID NO: 678 - RNA, 21 nt, synthetic construct
  source 1..21: mol_type = other RNA
ggaaaaaaaaagaataatgat

SEQ ID NO: 679 - RNA, 21 nt, synthetic construct
  source 1..21: mol_type = other RNA
agaataatgacccggccccct

SEQ ID NO: 680 - RNA, 21 nt, synthetic construct
  source 1..21: mol_type = other RNA
ttgtcactcggctttggctct

SEQ ID NO: 681 - RNA, 21 nt, synthetic construct
  source 1..21: mol_type = other RNA
ggctcgggacttcaaaatcat

SEQ ID NO: 682 - RNA, 21 nt, synthetic construct
  source 1..21: mol_type = other RNA
aatcagtgatgggagtaagat

SEQ ID NO: 683 - RNA, 21 nt, synthetic construct
  source 1..21: mol_type = other RNA
taagagcaaatttcatctttt

SEQ ID NO: 684 - RNA, 21 nt, synthetic construct
  source 1..21: mol_type = other RNA
tctttccaaattgatgggtgt

SEQ ID NO: 685 - RNA, 21 nt, synthetic construct
  source 1..21: mol_type = other RNA
aaaaaacattcaaaaacatgt

SEQ ID NO: 686 - RNA, 21 nt, synthetic construct
  source 1..21: mol_type = other RNA
attccttttgattcttttttt

SEQ ID NO: 687 - RNA, 21 nt, synthetic construct
  source 1..21: mol_type = other RNA
tgggggatttcaagggactgt

SEQ ID NO: 688 - RNA, 21 nt, synthetic construct
  source 1..21: mol_type = other RNA
cagcaacaaaggatttgaaat

SEQ ID NO: 689 - RNA, 21 nt, synthetic construct
  source 1..21: mol_type = other RNA
tgaaacttggtgtgttcgtgt

SEQ ID NO: 690 - RNA, 21 nt, synthetic construct
  source 1..21: mol_type = other RNA
ggtgtgttcgtggagccacat

SEQ ID NO: 691 - RNA, 23 nt, synthetic construct
  source 1..23: mol_type = other RNA
agttcaaagttcacctgatagtc

SEQ ID NO: 692 - RNA, 23 nt, synthetic construct
  source 1..23: mol_type = other RNA
aggctcagccatcctggttcaaa

SEQ ID NO: 693 - RNA, 23 nt, synthetic construct
  source 1..23: mol_type = other RNA
atcccagcgtgatcttccatcac

SEQ ID NO: 694 - RNA, 23 nt, synthetic construct
  source 1..23: mol_type = other RNA
atacgtcccagcgtgatcttcca

SEQ ID NO: 695 - RNA, 23 nt, synthetic construct
  source 1..23: mol_type = other RNA
atgtagcccccctgatctttcct

SEQ ID NO: 696 - RNA, 23 nt, synthetic construct
  source 1..23: mol_type = other RNA
atccgtgtcaccctcttggtctt

SEQ ID NO: 697 - RNA, 23 nt, synthetic construct
  source 1..23: mol_type = other RNA
agtctgcaggggagattctttca

SEQ ID NO: 698 - RNA, 23 nt, synthetic construct
  source 1..23: mol_type = other RNA
agggtctgcaggggagattcttt

SEQ ID NO: 699 - RNA, 23 nt, synthetic construct
  source 1..23: mol_type = other RNA
atttcagagcccggttcctcaga

SEQ ID NO: 700 - RNA, 23 nt, synthetic construct
  source 1..23: mol_type = other RNA
atcttagcatcagaggtttcaga

SEQ ID NO: 701 - RNA, 23 nt, synthetic construct
  source 1..23: mol_type = other RNA
actgcttcttcagcttccgctgt

SEQ ID NO: 702 - RNA, 23 nt, synthetic construct
  source 1..23: mol_type = other RNA
aggtgtctccaatgcctgcttct

SEQ ID NO: 703 - RNA, 23 nt, synthetic construct
  source 1..23: mol_type = other RNA
acccggaactctcaactcctctt

SEQ ID NO: 704 - RNA, 23 nt, synthetic construct
  source 1..23: mol_type = other RNA
agacgtgggcgctaatctcattg

SEQ ID NO: 705 - RNA, 23 nt, synthetic construct
  source 1..23: mol_type = other RNA
atggacgtgggcgctaatctcat

SEQ ID NO: 706 - RNA, 23 nt, synthetic construct
  source 1..23: mol_type = other RNA
aacgggagcttctggctctttct

SEQ ID NO: 707 - RNA, 23 nt, synthetic construct
  source 1..23: mol_type = other RNA
actttttgtccccactccaggga

SEQ ID NO: 708 - RNA, 23 nt, synthetic construct
  source 1..23: mol_type = other RNA
atgcaggtctcctagaagctggt

SEQ ID NO: 709 - RNA, 23 nt, synthetic construct
  source 1..23: mol_type = other RNA
atcctggtgcaggtctcctagaa

SEQ ID NO: 710 - RNA, 23 nt, synthetic construct
  source 1..23: mol_type = other RNA
atggaaactttggagaggaaatc

SEQ ID NO: 711 - RNA, 23 nt, synthetic construct
  source 1..23: mol_type = other RNA
aaggctgggatctctgtggaaac

SEQ ID NO: 712 - RNA, 23 nt, synthetic construct
  source 1..23: mol_type = other RNA
attctgcacgttgggtgtgattt

SEQ ID NO: 713 - RNA, 23 nt, synthetic construct
  source 1..23: mol_type = other RNA
atggaaatgcagcccttcccaaa

SEQ ID NO: 714 - RNA, 23 nt, synthetic construct
  source 1..23: mol_type = other RNA
actggaaatgcagcccttcccaa

SEQ ID NO: 715 - RNA, 23 nt, synthetic construct
  source 1..23: mol_type = other RNA
aaaggtcagcctcttttgtgtcc

SEQ ID NO: 716 - RNA, 23 nt, synthetic construct
  source 1..23: mol_type = other RNA
aagcagcaggctgcttttcagag

SEQ ID NO: 717 - RNA, 23 nt, synthetic construct
  source 1..23: mol_type = other RNA
aagcagcagcaggctgcttttca

SEQ ID NO: 718 - RNA, 23 nt, synthetic construct
  source 1..23: mol_type = other RNA
accgtctttgcttttactgacca

SEQ ID NO: 719 - RNA, 23 nt, synthetic construct
  source 1..23: mol_type = other RNA
atcatcgcttccagtcccgtctt

SEQ ID NO: 720 - RNA, 23 nt, synthetic construct
  source 1..23: mol_type = other RNA
acagttcgggaagtgacagaaga

SEQ ID NO: 721 - RNA, 23 nt, synthetic construct
  source 1..23: mol_type = other RNA
atggcgatcttcgttttaccatc

SEQ ID NO: 722 - RNA, 21 nt, synthetic construct
  source 1..21: mol_type = other RNA
ctatcaggtgaactttgaact

SEQ ID NO: 723 - RNA, 21 nt, synthetic construct
  source 1..21: mol_type = other RNA
tgaaccaggatggctgagcct

SEQ ID NO: 724 - RNA, 21 nt, synthetic construct
  source 1..21: mol_type = other RNA
gatggaagatcacgctgggat

SEQ ID NO: 725 - RNA, 21 nt, synthetic construct
  source 1..21: mol_type = other RNA
gaagatcacgctgggacgtat

SEQ ID NO: 726 - RNA, 21 nt, synthetic construct
  source 1..21: mol_type = other RNA
gaaagatcaggggggctacat

SEQ ID NO: 727 - RNA, 21 nt, synthetic construct
  source 1..21: mol_type = other RNA
gaccaagagggtgacacggat

SEQ ID NO: 728 - RNA, 21 nt, synthetic construct
  source 1..21: mol_type = other RNA
aaagaatctcccctgcagact

SEQ ID NO: 729 - RNA, 21 nt, synthetic construct
  source 1..21: mol_type = other RNA
agaatctcccctgcagaccct

SEQ ID NO: 730 - RNA, 21 nt, synthetic construct
  source 1..21: mol_type = other RNA
tgaggaaccgggctctgaaat

SEQ ID NO: 731 - RNA, 21 nt, synthetic construct
  source 1..21: mol_type = other RNA
tgaaacctctgatgctaagat

SEQ ID NO: 732 - RNA, 21 nt, synthetic construct
  source 1..21: mol_type = other RNA
agcggaagctgaagaagcagt

SEQ ID NO: 733 - RNA, 21 nt, synthetic construct
  source 1..21: mol_type = other RNA
aagcaggcattggagacacct

SEQ ID NO: 734 - RNA, 21 nt, synthetic construct
  source 1..21: mol_type = other RNA
gaggagttgagagttccgggt

SEQ ID NO: 735 - RNA, 21 nt, synthetic construct
  source 1..21: mol_type = other RNA
atgagattagcgcccacgtct

SEQ ID NO: 736 - RNA, 21 nt, synthetic construct
  source 1..21: mol_type = other RNA
gagattagcgcccacgtccat

SEQ ID NO: 737 - RNA, 21 nt, synthetic construct
  source 1..21: mol_type = other RNA
aaagagccagaagctcccgtt

SEQ ID NO: 738 - RNA, 21 nt, synthetic construct
  source 1..21: mol_type = other RNA
cctggagtggggacaaaaagt

SEQ ID NO: 739 - RNA, 21 nt, synthetic construct
  source 1..21: mol_type = other RNA
cagcttctaggagacctgcat

SEQ ID NO: 740 - RNA, 21 nt, synthetic construct
  source 1..21: mol_type = other RNA
ctaggagacctgcaccaggat

SEQ ID NO: 741 - RNA, 21 nt, synthetic construct
  source 1..21: mol_type = other RNA
tttcctctccaaagtttccat

SEQ ID NO: 742 - RNA, 21 nt, synthetic construct
  source 1..21: mol_type = other RNA
ttccacagagatcccagcctt

SEQ ID NO: 743 - RNA, 21 nt, synthetic construct
  source 1..21: mol_type = other RNA
atcacacccaacgtgcagaat

SEQ ID NO: 744 - RNA, 21 nt, synthetic construct
  source 1..21: mol_type = other RNA
tgggaagggctgcatttccat

SEQ ID NO: 745 - RNA, 21 nt, synthetic construct
  source 1..21: mol_type = other RNA
gggaagggctgcatttccagt

SEQ ID NO: 746 - RNA, 21 nt, synthetic construct
  source 1..21: mol_type = other RNA
acacaaaagaggctgaccttt

SEQ ID NO: 747 - RNA, 21 nt, synthetic construct
  source 1..21: mol_type = other RNA
ctgaaaagcagcctgctgctt

SEQ ID NO: 748 - RNA, 21 nt, synthetic construct
  source 1..21: mol_type = other RNA
aaaagcagcctgctgctgctt

SEQ ID NO: 749 - RNA, 21 nt, synthetic construct
  source 1..21: mol_type = other RNA
gtcagtaaaagcaaagacggt

SEQ ID NO: 750 - RNA, 21 nt, synthetic construct
  source 1..21: mol_type = other RNA
gacgggactggaagcgatgat

SEQ ID NO: 751 - RNA, 21 nt, synthetic construct
  source 1..21: mol_type = other RNA
ttctgtcacttcccgaactgt

SEQ ID NO: 752 - RNA, 21 nt, synthetic construct
  source 1..21: mol_type = other RNA
tggtaaaacgaagatcgccat

SEQ ID NO: 753 - RNA, 23 nt, synthetic construct
  source 1..23: mol_type = other RNA
ttcaaagttcacctgatagtcga

SEQ ID NO: 754 - RNA, 23 nt, synthetic construct
  source 1..23: mol_type = other RNA
tggcggggctcagccatcctggt

SEQ ID NO: 755 - RNA, 23 nt, synthetic construct
  source 1..23: mol_type = other RNA
tcacttcgaactcctggcggggc

SEQ ID NO: 756 - RNA, 23 nt, synthetic construct
  source 1..23: mol_type = other RNA
tttcaggccagcgtccgtgtcac

SEQ ID NO: 757 - RNA, 23 nt, synthetic construct
  source 1..23: mol_type = other RNA
tggagtgctcttagcatcagagg

SEQ ID NO: 758 - RNA, 23 nt, synthetic construct
  source 1..23: mol_type = other RNA
ttcagcttccgctgttggagtgc

SEQ ID NO: 759 - RNA, 23 nt, synthetic construct
  source 1..23: mol_type = other RNA
tccaatgcctgcttcttcagctt

SEQ ID NO: 760 - RNA, 23 nt, synthetic construct
  source 1..23: mol_type = other RNA
tcacgtgaccagcagcttcgtct

SEQ ID NO: 761 - RNA, 23 nt, synthetic construct
  source 1..23: mol_type = other RNA
tcaggcgccttcctctgccggcc

SEQ ID NO: 762 - RNA, 23 nt, synthetic construct
  source 1..23: mol_type = other RNA
tggacgtgggcgctaatctcatt

SEQ ID NO: 763 - RNA, 23 nt, synthetic construct
  source 1..23: mol_type = other RNA
tcaggcaggaggggagccccagg

SEQ ID NO: 764 - RNA, 23 nt, synthetic construct
  source 1..23: mol_type = other RNA
tcatcgacgtcgcggtcttcatc

SEQ ID NO: 765 - RNA, 23 nt, synthetic construct
  source 1..23: mol_type = other RNA
tttggagaggaaatccacaggga

SEQ ID NO: 766 - RNA, 23 nt, synthetic construct
  source 1..23: mol_type = other RNA
tgaggctgggatctctgtggaaa

SEQ ID NO: 767 - RNA, 23 nt, synthetic construct
  source 1..23: mol_type = other RNA
ttggcccgccctacactgggccc

SEQ ID NO: 768 - RNA, 23 nt, synthetic construct
  source 1..23: mol_type = other RNA
tccttctgcacgttgggtgtgat

SEQ ID NO: 769 - RNA, 23 nt, synthetic construct
  source 1..23: mol_type = other RNA
tgcgagctttgagttgagggacc

SEQ ID NO: 770 - RNA, 23 nt, synthetic construct
  source 1..23: mol_type = other RNA
tgcttttactgaccatgcgagct

SEQ ID NO: 771 - RNA, 23 nt, synthetic construct
  source 1..23: mol_type = other RNA
ttccagtcccgtctttgctttta

SEQ ID NO: 772 - RNA, 23 nt, synthetic construct
  source 1..23: mol_type = other RNA
ttttagcagaggaacgtgtggat

SEQ ID NO: 773 - RNA, 23 nt, synthetic construct
  source 1..23: mol_type = other RNA
tggggtgtttggggctaaggcaa

SEQ ID NO: 774 - RNA, 23 nt, synthetic construct
  source 1..23: mol_type = other RNA
taccaggagtggggtgtttgggg

SEQ ID NO: 775 - RNA, 23 nt, synthetic construct
  source 1..23: mol_type = other RNA
tcccctgattttggaggttcacc

SEQ ID NO: 776 - RNA, 23 nt, synthetic construct
  source 1..23: mol_type = other RNA
ttcccgcctcccggctggtgctt

SEQ ID NO: 777 - RNA, 23 nt, synthetic construct
  source 1..23: mol_type = other RNA
tttgtagactatttgcacactgc

SEQ ID NO: 778 - RNA, 23 nt, synthetic construct
  source 1..23: mol_type = other RNA
tttatgatggatgttgcctaatg

SEQ ID NO: 779 - RNA, 23 nt, synthetic construct
  source 1..23: mol_type = other RNA
ttacttccacctggccacctcct

SEQ ID NO: 780 - RNA, 23 nt, synthetic construct
  source 1..23: mol_type = other RNA
tattgtccagggacccaatcttc

SEQ ID NO: 781 - RNA, 23 nt, synthetic construct
  source 1..23: mol_type = other RNA
ttcctccgccagggacgtgggtg

SEQ ID NO: 782 - RNA, 23 nt, synthetic construct
  source 1..23: mol_type = other RNA
tttcaatctttttatttcctccg

SEQ ID NO: 783 - RNA, 23 nt, synthetic construct
  source 1..23: mol_type = other RNA
tcttggctttggcgttctcgcgg

SEQ ID NO: 784 - RNA, 23 nt, synthetic construct
  source 1..23: mol_type = other RNA
tggagacgtgtccccagacacca

SEQ ID NO: 785 - RNA, 23 nt, synthetic construct
  source 1..23: mol_type = other RNA
tgccggtggaggagacattgctg

SEQ ID NO: 786 - RNA, 23 nt, synthetic construct
  source 1..23: mol_type = other RNA
ttggccagggaggcagacacctc

SEQ ID NO: 787 - RNA, 23 nt, synthetic construct
  source 1..23: mol_type = other RNA
tctttttttttccacactctctc

SEQ ID NO: 788 - RNA, 23 nt, synthetic construct
  source 1..23: mol_type = other RNA
tactagcccacccatcaatttgg

SEQ ID NO: 789 - RNA, 23 nt, synthetic construct
  source 1..23: mol_type = other RNA
tcctttgttgctgccactgcctc

SEQ ID NO: 790 - RNA, 23 nt, synthetic construct
  source 1..23: mol_type = other RNA
ttctctttttacccgctgtccct

SEQ ID NO: 791 - RNA, 23 nt, synthetic construct
  source 1..23: mol_type = other RNA
tgccagcttgccttctcttttta

SEQ ID NO: 792 - RNA, 23 nt, synthetic construct
  source 1..23: mol_type = other RNA
ttttctaaggaggtcatccacga

SEQ ID NO: 793 - RNA, 23 nt, synthetic construct
  source 1..23: mol_type = other RNA
tcaggccccctaccctgcaggga

SEQ ID NO: 794 - RNA, 23 nt, synthetic construct
  source 1..23: mol_type = other RNA
ttcagaactcaataaaacagggt

SEQ ID NO: 795 - RNA, 23 nt, synthetic construct
  source 1..23: mol_type = other RNA
tcccaggtctgcaaagtggccaa

SEQ ID NO: 796 - RNA, 23 nt, synthetic construct
  source 1..23: mol_type = other RNA
tggttagccctaaagtcccaggt

SEQ ID NO: 797 - RNA, 23 nt, synthetic construct
  source 1..23: mol_type = other RNA
tgggctctcacggcagacaacag

SEQ ID NO: 798 - RNA, 23 nt, synthetic construct
  source 1..23: mol_type = other RNA
tataggcagtgattgggctctca

SEQ ID NO: 799 - RNA, 23 nt, synthetic construct
  source 1..23: mol_type = other RNA
tggtgaggctgggaattcgggac

SEQ ID NO: 800 - RNA, 23 nt, synthetic construct
  source 1..23: mol_type = other RNA
tactgagaaggggtggtgaggct

SEQ ID NO: 801 - RNA, 23 nt, synthetic construct
  source 1..23: mol_type = other RNA
taggtacctcctgcaaccaacca

SEQ ID NO: 802 - RNA, 23 nt, synthetic construct
  source 1..23: mol_type = other RNA
tgtgcctggactttgccttccct

SEQ ID NO: 803 - RNA, 23 nt, synthetic construct
  source 1..23: mol_type = other RNA
tcccactcttgtgcctggacttt

SEQ ID NO: 804 - RNA, 23 nt, synthetic construct
  source 1..23: mol_type = other RNA
tgagtggaactgagagtgagagg

SEQ ID NO: 805 - RNA, 23 nt, synthetic construct
  source 1..23: mol_type = other RNA
tccatgtcaacaaggcagaaaca

SEQ ID NO: 806 - RNA, 23 nt, synthetic construct
  source 1..23: mol_type = other RNA
tgggctcagcacaggaaggggcc

SEQ ID NO: 807 - RNA, 23 nt, synthetic construct
  source 1..23: mol_type = other RNA
tggcagctacaagctagggtgca

SEQ ID NO: 808 - RNA, 23 nt, synthetic construct
  source 1..23: mol_type = other RNA
tctgggaggttggcagctacaag

SEQ ID NO: 809 - RNA, 23 nt, synthetic construct
  source 1..23: mol_type = other RNA
tcccctttgtcgggtgtggaggg

SEQ ID NO: 810 - RNA, 23 nt, synthetic construct
  source 1..23: mol_type = other RNA
taaacagacaaatccaactacaa

SEQ ID NO: 811 - RNA, 23 nt, synthetic construct
  source 1..23: mol_type = other RNA
tggtgaatccaagcataaacaga

SEQ ID NO: 812 - RNA, 23 nt, synthetic construct
  source 1..23: mol_type = other RNA
ttacaagcatttcaagatacatg

SEQ ID NO: 813 - RNA, 23 nt, synthetic construct
  source 1..23: mol_type = other RNA
tagggaaggggacatcatcgctt

SEQ ID NO: 814 - RNA, 23 nt, synthetic construct
  source 1..23: mol_type = other RNA
taagcctcctttgggactgccat

SEQ ID NO: 815 - RNA, 23 nt, synthetic construct
  source 1..23: mol_type = other RNA
tggtgggaggctgcgctgcccct

SEQ ID NO: 816 - RNA, 23 nt, synthetic construct
  source 1..23: mol_type = other RNA
ttgggcctctagagcagatccag

SEQ ID NO: 817 - RNA, 23 nt, synthetic construct
  source 1..23: mol_type = other RNA
tcaagtcatccttcctcaggcag

SEQ ID NO: 818 - RNA, 23 nt, synthetic construct
  source 1..23: mol_type = other RNA
tttctcatggcagcagatggagt

SEQ ID NO: 819 - RNA, 23 nt, synthetic construct
  source 1..23: mol_type = other RNA
tgggcctgaggctgctgagtttc

SEQ ID NO: 820 - RNA, 23 nt, synthetic construct
  source 1..23: mol_type = other RNA
tactgccaagtccctcagggttg

SEQ ID NO: 821 - RNA, 23 nt, synthetic construct
  source 1..23: mol_type = other RNA
tcagcgaacggcagggaggctct

SEQ ID NO: 822 - RNA, 23 nt, synthetic construct
  source 1..23: mol_type = other RNA
ttaggagaattgctgggactcag

SEQ ID NO: 823 - RNA, 23 nt, synthetic construct
  source 1..23: mol_type = other RNA
tcagatcccttcaacttaggaga

SEQ ID NO: 824 - RNA, 23 nt, synthetic construct
  source 1..23: mol_type = other RNA
tatctctaaccaccaccaaatct

SEQ ID NO: 825 - RNA, 23 nt, synthetic construct
  source 1..23: mol_type = other RNA
taaaccatgatcttaggctggcc

SEQ ID NO: 826 - RNA, 23 nt, synthetic construct
  source 1..23: mol_type = other RNA
tttcaatttatctgccagcactg

SEQ ID NO: 827 - RNA, 23 nt, synthetic construct
  source 1..23: mol_type = other RNA
tgggagaagtgaggggaggggag

SEQ ID NO: 828 - RNA, 23 nt, synthetic construct
  source 1..23: mol_type = other RNA
tcaatttaaatggaactattgat

SEQ ID NO: 829 - RNA, 23 nt, synthetic construct
  source 1..23: mol_type = other RNA
tccccccatagcacaacaagcaa

SEQ ID NO: 830 - RNA, 23 nt, synthetic construct
  source 1..23: mol_type = other RNA
tcctcccccctccccccatagca

SEQ ID NO: 831 - RNA, 23 nt, synthetic construct
  source 1..23: mol_type = other RNA
ttaactatcttacacattcctcc

SEQ ID NO: 832 - RNA, 23 nt, synthetic construct
  source 1..23: mol_type = other RNA
tcatgaaaagggttacgaggcag

SEQ ID NO: 833 - RNA, 23 nt, synthetic construct
  source 1..23: mol_type = other RNA
tccctccctctagcaaatgtggt

SEQ ID NO: 834 - RNA, 23 nt, synthetic construct
  source 1..23: mol_type = other RNA
tggagccagtgtgagaggtggca

SEQ ID NO: 835 - RNA, 23 nt, synthetic construct
  source 1..23: mol_type = other RNA
tctcagctccaaaagcacaggct

SEQ ID NO: 836 - RNA, 23 nt, synthetic construct
  source 1..23: mol_type = other RNA
tcacctctgccctcgccccgacc

SEQ ID NO: 837 - RNA, 23 nt, synthetic construct
  source 1..23: mol_type = other RNA
tctgtagatgggacacgcaggtg

SEQ ID NO: 838 - RNA, 23 nt, synthetic construct
  source 1..23: mol_type = other RNA
ttatgaagctgcaggtctgtaga

SEQ ID NO: 839 - RNA, 23 nt, synthetic construct
  source 1..23: mol_type = other RNA
tcctgctcaacatggcaaactca

SEQ ID NO: 840 - RNA, 23 nt, synthetic construct
  source 1..23: mol_type = other RNA
tgtccctccccccaccctcagaa

SEQ ID NO: 841 - RNA, 23 nt, synthetic construct
  source 1..23: mol_type = other RNA
tgtaaatcatttgttaaaacaca

SEQ ID NO: 842 - RNA, 23 nt, synthetic construct
  source 1..23: mol_type = other RNA
tacagcaacagtcagtgtaaatc

SEQ ID NO: 843 - RNA, 23 nt, synthetic construct
  source 1..23: mol_type = other RNA
ttccaaattcacttttacagcaa

SEQ ID NO: 844 - RNA, 23 nt, synthetic construct
  source 1..23: mol_type = other RNA
tctgtggaaactttggagaggaa

SEQ ID NO: 845 - RNA, 23 nt, synthetic construct
  source 1..23: mol_type = other RNA
ttttactgaccatgcgagctttg

SEQ ID NO: 846 - RNA, 23 nt, synthetic construct
  source 1..23: mol_type = other RNA
ttggcttttttgtcatcgcttcc

SEQ ID NO: 847 - RNA, 23 nt, synthetic construct
  source 1..23: mol_type = other RNA
tcaaggttttagcagaggaacgt

SEQ ID NO: 848 - RNA, 23 nt, synthetic construct
  source 1..23: mol_type = other RNA
tatttttcaaggttttagcagag

SEQ ID NO: 849 - RNA, 23 nt, synthetic construct
  source 1..23: mol_type = other RNA
tttcatctcctttgctccagaac

SEQ ID NO: 850 - RNA, 23 nt, synthetic construct
  source 1..23: mol_type = other RNA
tggcgatcttcgttttaccatca

SEQ ID NO: 851 - RNA, 23 nt, synthetic construct
  source 1..23: mol_type = other RNA
ttggacttgacattcttcaggtc

SEQ ID NO: 852 - RNA, 23 nt, synthetic construct
  source 1..23: mol_type = other RNA
tgtttgatattatcctttgagcc

SEQ ID NO: 853 - RNA, 23 nt, synthetic construct
  source 1..23: mol_type = other RNA
tcaggtcaactggtttgtagact

SEQ ID NO: 854 - RNA, 23 nt, synthetic construct
  source 1..23: mol_type = other RNA
tggtttatgatggatgttgccta

SEQ ID NO: 855 - RNA, 23 nt, synthetic construct
  source 1..23: mol_type = other RNA
ttctcagattttacttccacctg

SEQ ID NO: 856 - RNA, 23 nt, synthetic construct
  source 1..23: mol_type = other RNA
tgggtttcaatctttttatttcc

SEQ ID NO: 857 - RNA, 23 nt, synthetic construct
  source 1..23: mol_type = other RNA
tctcattctctcctctccacaat

SEQ ID NO: 858 - RNA, 23 nt, synthetic construct
  source 1..23: mol_type = other RNA
tttttttccacactctctcattc

SEQ ID NO: 859 - RNA, 23 nt, synthetic construct
  source 1..23: mol_type = other RNA
ttattctttttttttccacactc

SEQ ID NO: 860 - RNA, 23 nt, synthetic construct
  source 1..23: mol_type = other RNA
ttaaccaattaaccgaactgcga

SEQ ID NO: 861 - RNA, 23 nt, synthetic construct
  source 1..23: mol_type = other RNA
tgattttgaagtcccgagccaaa

SEQ ID NO: 862 - RNA, 23 nt, synthetic construct
  source 1..23: mol_type = other RNA
tttgctcttactcccatcactga

SEQ ID NO: 863 - RNA, 23 nt, synthetic construct
  source 1..23: mol_type = other RNA
tttggaaagatgaaatttgctct

SEQ ID NO: 864 - RNA, 23 nt, synthetic construct
  source 1..23: mol_type = other RNA
tttttttaaatattttattacta

SEQ ID NO: 865 - RNA, 23 nt, synthetic construct
  source 1..23: mol_type = other RNA
tttgaatgtttttttttaaatat

SEQ ID NO: 866 - RNA, 23 nt, synthetic construct
  source 1..23: mol_type = other RNA
tgtttttgaatgtttttttttaa

SEQ ID NO: 867 - RNA, 23 nt, synthetic construct
  source 1..23: mol_type = other RNA
tggagggggaagaaaaaagaatc

SEQ ID NO: 868 - RNA, 23 nt, synthetic construct
  source 1..23: mol_type = other RNA
ttctacatggagggggaagaaaa

SEQ ID NO: 869 - RNA, 23 nt, synthetic construct
  source 1..23: mol_type = other RNA
tcaagacatcaaggtcagtcttt

SEQ ID NO: 870 - RNA, 23 nt, synthetic construct
  source 1..23: mol_type = other RNA
ttcccttaatttcaccctcagta

SEQ ID NO: 871 - RNA, 23 nt, synthetic construct
  source 1..23: mol_type = other RNA
ttagaaacctctttacaagcatt

SEQ ID NO: 872 - RNA, 23 nt, synthetic construct
  source 1..23: mol_type = other RNA
ttcagtcctaatcctgtgcttca

SEQ ID NO: 873 - RNA, 23 nt, synthetic construct
  source 1..23: mol_type = other RNA
ttcttgtgatgcaggagttgtaa

SEQ ID NO: 874 - RNA, 23 nt, synthetic construct
  source 1..23: mol_type = other RNA
tcctttttcttgtgatgcaggag

SEQ ID NO: 875 - RNA, 23 nt, synthetic construct
  source 1..23: mol_type = other RNA
ttaggcagcaatgttttgcaaag

SEQ ID NO: 876 - RNA, 23 nt, synthetic construct
  source 1..23: mol_type = other RNA
tttcaggtaaagctctagctgca

SEQ ID NO: 877 - RNA, 23 nt, synthetic construct
  source 1..23: mol_type = other RNA
tcaacttaggagaattgctggga

SEQ ID NO: 878 - RNA, 23 nt, synthetic construct
  source 1..23: mol_type = other RNA
tctctaaccaccaccaaatctac

SEQ ID NO: 879 - RNA, 23 nt, synthetic construct
  source 1..23: mol_type = other RNA
taatgaggggggcatatctctaa

SEQ ID NO: 880 - RNA, 23 nt, synthetic construct
  source 1..23: mol_type = other RNA
tcaccctaaaccatgatcttagg

SEQ ID NO: 881 - RNA, 23 nt, synthetic construct
  source 1..23: mol_type = other RNA
tcatttaagatcacaagccagcg

SEQ ID NO: 882 - RNA, 23 nt, synthetic construct
  source 1..23: mol_type = other RNA
tgtcctcatttaagatcacaagc

SEQ ID NO: 883 - RNA, 23 nt, synthetic construct
  source 1..23: mol_type = other RNA
tatatcctatctagcccacccaa

SEQ ID NO: 884 - RNA, 23 nt, synthetic construct
  source 1..23: mol_type = other RNA
ttgataaagtgagtcagcagctt

SEQ ID NO: 885 - RNA, 23 nt, synthetic construct
  source 1..23: mol_type = other RNA
tacagtctcaccactgaagtcaa

SEQ ID NO: 886 - RNA, 23 nt, synthetic construct
  source 1..23: mol_type = other RNA
tgaaaagggttacgaggcagttt

SEQ ID NO: 887 - RNA, 23 nt, synthetic construct
  source 1..23: mol_type = other RNA
tgtggttgaaatcatgaaaaggg

SEQ ID NO: 888 - RNA, 23 nt, synthetic construct
  source 1..23: mol_type = other RNA
tcgtggctttacttggagaacaa

SEQ ID NO: 889 - RNA, 23 nt, synthetic construct
  source 1..23: mol_type = other RNA
tgaagagaaatcagaagttttat

SEQ ID NO: 890 - RNA, 23 nt, synthetic construct
  source 1..23: mol_type = other RNA
tcaaagctgaagagaaatcagaa

SEQ ID NO: 891 - RNA, 23 nt, synthetic construct
  source 1..23: mol_type = other RNA
tcatggggctaagtctattagga

SEQ ID NO: 892 - RNA, 23 nt, synthetic construct
  source 1..23: mol_type = other RNA
ttgcaagtgccagaaatagtcct

SEQ ID NO: 893 - RNA, 23 nt, synthetic construct
  source 1..23: mol_type = other RNA
taccgaagaaatcatgggacttg

SEQ ID NO: 894 - RNA, 23 nt, synthetic construct
  source 1..23: mol_type = other RNA
ttcacagacagaaagctaagcta

SEQ ID NO: 895 - RNA, 23 nt, synthetic construct
  source 1..23: mol_type = other RNA
tacactatatagacattcacaga

SEQ ID NO: 896 - RNA, 23 nt, synthetic construct
  source 1..23: mol_type = other RNA
tgttaaaacacacaatacactat

SEQ ID NO: 897 - RNA, 23 nt, synthetic construct
  source 1..23: mol_type = other RNA
tcagtgtaaatcatttgttaaaa

SEQ ID NO: 898 - RNA, 23 nt, synthetic construct
  source 1..23: mol_type = other RNA
ttatttccaaattcacttttaca

SEQ ID NO: 899 - RNA, 21 nt, synthetic construct
  source 1..21: mol_type = other RNA
gactatcaggtgaactttgaa

SEQ ID NO: 900 - RNA, 21 nt, synthetic construct
  source 1..21: mol_type = other RNA
caggatggctgagccccgcca

SEQ ID NO: 901 - RNA, 21 nt, synthetic construct
  source 1..21: mol_type = other RNA
cccgccaggagttcgaagtga

SEQ ID NO: 902 - RNA, 21 nt, synthetic construct
  source 1..21: mol_type = other RNA
gacacggacgctggcctgaaa

SEQ ID NO: 903 - RNA, 21 nt, synthetic construct
  source 1..21: mol_type = other RNA
tctgatgctaagagcactcca

SEQ ID NO: 904 - RNA, 21 nt, synthetic construct
  source 1..21: mol_type = other RNA
actccaacagcggaagctgaa

SEQ ID NO: 905 - RNA, 21 nt, synthetic construct
  source 1..21: mol_type = other RNA
gctgaagaagcaggcattgga

SEQ ID NO: 906 - RNA, 21 nt, synthetic construct
  source 1..21: mol_type = other RNA
acgaagctgctggtcacgtga

SEQ ID NO: 907 - RNA, 21 nt, synthetic construct
  source 1..21: mol_type = other RNA
ccggcagaggaaggcgcctga

SEQ ID NO: 908 - RNA, 21 nt, synthetic construct
  source 1..21: mol_type = other RNA
tgagattagcgcccacgtcca

SEQ ID NO: 909 - RNA, 21 nt, synthetic construct
  source 1..21: mol_type = other RNA
tggggctcccctcctgcctga

SEQ ID NO: 910 - RNA, 21 nt, synthetic construct
  source 1..21: mol_type = other RNA
tgaagaccgcgacgtcgatga

SEQ ID NO: 911 - RNA, 21 nt, synthetic construct
  source 1..21: mol_type = other RNA
cctgtggatttcctctccaaa

SEQ ID NO: 912 - RNA, 21 nt, synthetic construct
  source 1..21: mol_type = other RNA
tccacagagatcccagcctca

SEQ ID NO: 913 - RNA, 21 nt, synthetic construct
  source 1..21: mol_type = other RNA
gcccagtgtagggcgggccaa

SEQ ID NO: 914 - RNA, 21 nt, synthetic construct
  source 1..21: mol_type = other RNA
cacacccaacgtgcagaagga

SEQ ID NO: 915 - RNA, 21 nt, synthetic construct
  source 1..21: mol_type = other RNA
tccctcaactcaaagctcgca

SEQ ID NO: 916 - RNA, 21 nt, synthetic construct
  source 1..21: mol_type = other RNA
ctcgcatggtcagtaaaagca

SEQ ID NO: 917 - RNA, 21 nt, synthetic construct
  source 1..21: mol_type = other RNA
aaagcaaagacgggactggaa

SEQ ID NO: 918 - RNA, 21 nt, synthetic construct
  source 1..21: mol_type = other RNA
ccacacgttcctctgctaaaa

SEQ ID NO: 919 - RNA, 21 nt, synthetic construct
  source 1..21: mol_type = other RNA
gccttagccccaaacacccca

SEQ ID NO: 920 - RNA, 21 nt, synthetic construct
  source 1..21: mol_type = other RNA
ccaaacaccccactcctggta

SEQ ID NO: 921 - RNA, 21 nt, synthetic construct
  source 1..21: mol_type = other RNA
tgaacctccaaaatcagggga

SEQ ID NO: 922 - RNA, 21 nt, synthetic construct
  source 1..21: mol_type = other RNA
gcaccagccgggaggcgggaa

SEQ ID NO: 923 - RNA, 21 nt, synthetic construct
  source 1..21: mol_type = other RNA
agtgtgcaaatagtctacaaa

SEQ ID NO: 924 - RNA, 21 nt, synthetic construct
  source 1..21: mol_type = other RNA
ttaggcaacatccatcataaa

SEQ ID NO: 925 - RNA, 21 nt, synthetic construct
  source 1..21: mol_type = other RNA
gaggtggccaggtggaagtaa

SEQ ID NO: 926 - RNA, 21 nt, synthetic construct
  source 1..21: mol_type = other RNA
agattgggtccctggacaata

SEQ ID NO: 927 - RNA, 21 nt, synthetic construct
  source 1..21: mol_type = other RNA
cccacgtccctggcggaggaa

SEQ ID NO: 928 - RNA, 21 nt, synthetic construct
  source 1..21: mol_type = other RNA
gaggaaataaaaagattgaaa

SEQ ID NO: 929 - RNA, 21 nt, synthetic construct
  source 1..21: mol_type = other RNA
gcgagaacgccaaagccaaga

SEQ ID NO: 930 - RNA, 21 nt, synthetic construct
  source 1..21: mol_type = other RNA
gtgtctggggacacgtctcca

SEQ ID NO: 931 - RNA, 21 nt, synthetic construct
  source 1..21: mol_type = other RNA
gcaatgtctcctccaccggca

SEQ ID NO: 932 - RNA, 21 nt, synthetic construct
  source 1..21: mol_type = other RNA
ggtgtctgcctccctggccaa

SEQ ID NO: 933 - RNA, 21 nt, synthetic construct
  source 1..21: mol_type = other RNA
gagagtgtggaaaaaaaaaga

SEQ ID NO: 934 - RNA, 21 nt, synthetic construct
  source 1..21: mol_type = other RNA
aaattgatgggtgggctagta

SEQ ID NO: 935 - RNA, 21 nt, synthetic construct
  source 1..21: mol_type = other RNA
ggcagtggcagcaacaaagga

SEQ ID NO: 936 - RNA, 21 nt, synthetic construct
  source 1..21: mol_type = other RNA
ggacagcgggtaaaaagagaa

SEQ ID NO: 937 - RNA, 21 nt, synthetic construct
  source 1..21: mol_type = other RNA
aaaagagaaggcaagctggca

SEQ ID NO: 938 - RNA, 21 nt, synthetic construct
  source 1..21: mol_type = other RNA
gtggatgacctccttagaaaa

SEQ ID NO: 939 - RNA, 21 nt, synthetic construct
  source 1..21: mol_type = other RNA
cctgcagggtagggggcctga

SEQ ID NO: 940 - RNA, 21 nt, synthetic construct
  source 1..21: mol_type = other RNA
cctgttttattgagttctgaa

SEQ ID NO: 941 - RNA, 21 nt, synthetic construct
  source 1..21: mol_type = other RNA
ggccactttgcagacctggga

SEQ ID NO: 942 - RNA, 21 nt, synthetic construct
  source 1..21: mol_type = other RNA
ctgggactttagggctaacca

SEQ ID NO: 943 - RNA, 21 nt, synthetic construct
  source 1..21: mol_type = other RNA
gttgtctgccgtgagagccca

SEQ ID NO: 944 - RNA, 21 nt, synthetic construct
  source 1..21: mol_type = other RNA
agagcccaatcactgcctata

SEQ ID NO: 945 - RNA, 21 nt, synthetic construct
  source 1..21: mol_type = other RNA
cccgaattcccagcctcacca

SEQ ID NO: 946 - RNA, 21 nt, synthetic construct
  source 1..21: mol_type = other RNA
cctcaccaccccttctcagta

SEQ ID NO: 947 - RNA, 21 nt, synthetic construct
  source 1..21: mol_type = other RNA
gttggttgcaggaggtaccta

SEQ ID NO: 948 - RNA, 21 nt, synthetic construct
  source 1..21: mol_type = other RNA
ggaaggcaaagtccaggcaca

SEQ ID NO: 949 - RNA, 21 nt, synthetic construct
  source 1..21: mol_type = other RNA
agtccaggcacaagagtggga

SEQ ID NO: 950 - RNA, 21 nt, synthetic construct
  source 1..21: mol_type = other RNA
tctcactctcagttccactca

SEQ ID NO: 951 - RNA, 21 nt, synthetic construct
  source 1..21: mol_type = other RNA
tttctgccttgttgacatgga

SEQ ID NO: 952 - RNA, 21 nt, synthetic construct
  source 1..21: mol_type = other RNA
ccccttcctgtgctgagccca

SEQ ID NO: 953 - RNA, 21 nt, synthetic construct
  source 1..21: mol_type = other RNA
caccctagcttgtagctgcca

SEQ ID NO: 954 - RNA, 21 nt, synthetic construct
  source 1..21: mol_type = other RNA
tgtagctgccaacctcccaga

SEQ ID NO: 955 - RNA, 21 nt, synthetic construct
  source 1..21: mol_type = other RNA
ctccacacccgacaaagggga

SEQ ID NO: 956 - RNA, 21 nt, synthetic construct
  source 1..21: mol_type = other RNA
gtagttggatttgtctgttta

SEQ ID NO: 957 - RNA, 21 nt, synthetic construct
  source 1..21: mol_type = other RNA
tgtttatgcttggattcacca

SEQ ID NO: 958 - RNA, 21 nt, synthetic construct
  source 1..21: mol_type = other RNA
tgtatcttgaaatgcttgtaa

SEQ ID NO: 959 - RNA, 21 nt, synthetic construct
  source 1..21: mol_type = other RNA
gcgatgatgtccccttcccta

SEQ ID NO: 960 - RNA, 21 nt, synthetic construct
  source 1..21: mol_type = other RNA
ggcagtcccaaaggaggctta

SEQ ID NO: 961 - RNA, 21 nt, synthetic construct
  source 1..21: mol_type = other RNA
gggcagcgcagcctcccacca

SEQ ID NO: 962 - RNA, 21 nt, synthetic construct
  source 1..21: mol_type = other RNA
ggatctgctctagaggcccaa

SEQ ID NO: 963 - RNA, 21 nt, synthetic construct
  source 1..21: mol_type = other RNA
gcctgaggaaggatgacttga

SEQ ID NO: 964 - RNA, 21 nt, synthetic construct
  source 1..21: mol_type = other RNA
tccatctgctgccatgagaaa

SEQ ID NO: 965 - RNA, 21 nt, synthetic construct
  source 1..21: mol_type = other RNA
aactcagcagcctcaggccca

SEQ ID NO: 966 - RNA, 21 nt, synthetic construct
  source 1..21: mol_type = other RNA
accctgagggacttggcagta

SEQ ID NO: 967 - RNA, 21 nt, synthetic construct
  source 1..21: mol_type = other RNA
agcctccctgccgttcgctga

SEQ ID NO: 968 - RNA, 21 nt, synthetic construct
  source 1..21: mol_type = other RNA
gagtcccagcaattctcctaa

SEQ ID NO: 969 - RNA, 21 nt, synthetic construct
  source 1..21: mol_type = other RNA
tcctaagttgaagggatctga

SEQ ID NO: 970 - RNA, 21 nt, synthetic construct
  source 1..21: mol_type = other RNA
atttggtggtggttagagata

SEQ ID NO: 971 - RNA, 21 nt, synthetic construct
  source 1..21: mol_type = other RNA
ccagcctaagatcatggttta

SEQ ID NO: 972 - RNA, 21 nt, synthetic construct
  source 1..21: mol_type = other RNA
gtgctggcagataaattgaaa

SEQ ID NO: 973 - RNA, 21 nt, synthetic construct
  source 1..21: mol_type = other RNA
cccctcccctcacttctccca

SEQ ID NO: 974 - RNA, 21 nt, synthetic construct
  source 1..21: mol_type = other RNA
caatagttccatttaaattga

SEQ ID NO: 975 - RNA, 21 nt, synthetic construct
  source 1..21: mol_type = other RNA
gcttgttgtgctatgggggga

SEQ ID NO: 976 - RNA, 21 nt, synthetic construct
  source 1..21: mol_type = other RNA
ctatggggggaggggggagga

SEQ ID NO: 977 - RNA, 21 nt, synthetic construct
  source 1..21: mol_type = other RNA
aggaatgtgtaagatagttaa

SEQ ID NO: 978 - RNA, 21 nt, synthetic construct
  source 1..21: mol_type = other RNA
gcctcgtaacccttttcatga

SEQ ID NO: 979 - RNA, 21 nt, synthetic construct
  source 1..21: mol_type = other RNA
cacatttgctagagggaggga

SEQ ID NO: 980 - RNA, 21 nt, synthetic construct
  source 1..21: mol_type = other RNA
ccacctctcacactggctcca

SEQ ID NO: 981 - RNA, 21 nt, synthetic construct
  source 1..21: mol_type = other RNA
cctgtgcttttggagctgaga

SEQ ID NO: 982 - RNA, 21 nt, synthetic construct
  source 1..21: mol_type = other RNA
tcggggcgagggcagaggtga

SEQ ID NO: 983 - RNA, 21 nt, synthetic construct
  source 1..21: mol_type = other RNA
cctgcgtgtcccatctacaga

SEQ ID NO: 984 - RNA, 21 nt, synthetic construct
  source 1..21: mol_type = other RNA
tacagacctgcagcttcataa

SEQ ID NO: 985 - RNA, 21 nt, synthetic construct
  source 1..21: mol_type = other RNA
agtttgccatgttgagcagga

SEQ ID NO: 986 - RNA, 21 nt, synthetic construct
  source 1..21: mol_type = other RNA
ctgagggtggggggagggaca

SEQ ID NO: 987 - RNA, 21 nt, synthetic construct
  source 1..21: mol_type = other RNA
tgttttaacaaatgatttaca

SEQ ID NO: 988 - RNA, 21 nt, synthetic construct
  source 1..21: mol_type = other RNA
tttacactgactgttgctgta

SEQ ID NO: 989 - RNA, 21 nt, synthetic construct
  source 1..21: mol_type = other RNA
gctgtaaaagtgaatttggaa

SEQ ID NO: 990 - RNA, 21 nt, synthetic construct
  source 1..21: mol_type = other RNA
cctctccaaagtttccacaga

SEQ ID NO: 991 - RNA, 21 nt, synthetic construct
  source 1..21: mol_type = other RNA
aagctcgcatggtcagtaaaa

SEQ ID NO: 992 - RNA, 21 nt, synthetic construct
  source 1..21: mol_type = other RNA
aagcgatgacaaaaaagccaa

SEQ ID NO: 993 - RNA, 21 nt, synthetic construct
  source 1..21: mol_type = other RNA
gttcctctgctaaaaccttga

SEQ ID NO: 994 - RNA, 21 nt, synthetic construct
  source 1..21: mol_type = other RNA
ctgctaaaaccttgaaaaata

SEQ ID NO: 995 - RNA, 21 nt, synthetic construct
  source 1..21: mol_type = other RNA
tctggagcaaaggagatgaaa

SEQ ID NO: 996 - RNA, 21 nt, synthetic construct
  source 1..21: mol_type = other RNA
atggtaaaacgaagatcgcca

SEQ ID NO: 997 - RNA, 21 nt, synthetic construct
  source 1..21: mol_type = other RNA
cctgaagaatgtcaagtccaa

SEQ ID NO: 998 - RNA, 21 nt, synthetic construct
  source 1..21: mol_type = other RNA
ctcaaaggataatatcaaaca

SEQ ID NO: 999 - RNA, 21 nt, synthetic construct
  source 1..21: mol_type = other RNA
tctacaaaccagttgacctga

SEQ ID NO: 1000 - RNA, 21 nt, synthetic construct
  source 1..21: mol_type = other RNA
ggcaacatccatcataaacca

SEQ ID NO: 1001 - RNA, 21 nt, synthetic construct
  source 1..21: mol_type = other RNA
ggtggaagtaaaatctgagaa

SEQ ID NO: 1002 - RNA, 21 nt, synthetic construct
  source 1..21: mol_type = other RNA
aaataaaaagattgaaaccca

SEQ ID NO: 1003 - RNA, 21 nt, synthetic construct
  source 1..21: mol_type = other RNA
tgtggagaggagagaatgaga

SEQ ID NO: 1004 - RNA, 21 nt, synthetic construct
  source 1..21: mol_type = other RNA
atgagagagtgtggaaaaaaa

SEQ ID NO: 1005 - RNA, 21 nt, synthetic construct
  source 1..21: mol_type = other RNA
gtgtggaaaaaaaaagaataa

SEQ ID NO: 1006 - RNA, 21 nt, synthetic construct
  source 1..21: mol_type = other RNA
gcagttcggttaattggttaa

SEQ ID NO: 1007 - RNA, 21 nt, synthetic construct
  source 1..21: mol_type = other RNA
tggctcgggacttcaaaatca

SEQ ID NO: 1008 - RNA, 21 nt, synthetic construct
  source 1..21: mol_type = other RNA
agtgatgggagtaagagcaaa

SEQ ID NO: 1009 - RNA, 21 nt, synthetic construct
  source 1..21: mol_type = other RNA
agcaaatttcatctttccaaa

SEQ ID NO: 1010 - RNA, 21 nt, synthetic construct
  source 1..21: mol_type = other RNA
gtaataaaatatttaaaaaaa

SEQ ID NO: 1011 - RNA, 21 nt, synthetic construct
  source 1..21: mol_type = other RNA
atttaaaaaaaaacattcaaa

SEQ ID NO: 1012 - RNA, 21 nt, synthetic construct
  source 1..21: mol_type = other RNA
aaaaaaaaacattcaaaaaca

SEQ ID NO: 1013 - RNA, 21 nt, synthetic construct
  source 1..21: mol_type = other RNA
ttcttttttcttccccctcca

SEQ ID NO: 1014 - RNA, 21 nt, synthetic construct
  source 1..21: mol_type = other RNA
ttcttccccctccatgtagaa

SEQ ID NO: 1015 - RNA, 21 nt, synthetic construct
  source 1..21: mol_type = other RNA
agactgaccttgatgtcttga

SEQ ID NO: 1016 - RNA, 21 nt, synthetic construct
  source 1..21: mol_type = other RNA
ctgagggtgaaattaagggaa

SEQ ID NO: 1017 - RNA, 21 nt, synthetic construct
  source 1..21: mol_type = other RNA
tgcttgtaaagaggtttctaa

SEQ ID NO: 1018 - RNA, 21 nt, synthetic construct
  source 1..21: mol_type = other RNA
aagcacaggattaggactgaa

SEQ ID NO: 1019 - RNA, 21 nt, synthetic construct
  source 1..21: mol_type = other RNA
acaactcctgcatcacaagaa

SEQ ID NO: 1020 - RNA, 21 nt, synthetic construct
  source 1..21: mol_type = other RNA
cctgcatcacaagaaaaagga

SEQ ID NO: 1021 - RNA, 21 nt, synthetic construct
  source 1..21: mol_type = other RNA
ttgcaaaacattgctgcctaa

SEQ ID NO: 1022 - RNA, 21 nt, synthetic construct
  source 1..21: mol_type = other RNA
cagctagagctttacctgaaa

SEQ ID NO: 1023 - RNA, 21 nt, synthetic construct
  source 1..21: mol_type = other RNA
ccagcaattctcctaagttga

SEQ ID NO: 1024 - RNA, 21 nt, synthetic construct
  source 1..21: mol_type = other RNA
agatttggtggtggttagaga

SEQ ID NO: 1025 - RNA, 21 nt, synthetic construct
  source 1..21: mol_type = other RNA
agagatatgcccccctcatta

SEQ ID NO: 1026 - RNA, 21 nt, synthetic construct
  source 1..21: mol_type = other RNA
taagatcatggtttagggtga

SEQ ID NO: 1027 - RNA, 21 nt, synthetic construct
  source 1..21: mol_type = other RNA
ctggcttgtgatcttaaatga

SEQ ID NO: 1028 - RNA, 21 nt, synthetic construct
  source 1..21: mol_type = other RNA
ttgtgatcttaaatgaggaca

SEQ ID NO: 1029 - RNA, 21 nt, synthetic construct
  source 1..21: mol_type = other RNA
gggtgggctagataggatata

SEQ ID NO: 1030 - RNA, 21 nt, synthetic construct
  source 1..21: mol_type = other RNA
gctgctgactcactttatcaa

SEQ ID NO: 1031 - RNA, 21 nt, synthetic construct
  source 1..21: mol_type = other RNA
gacttcagtggtgagactgta

SEQ ID NO: 1032 - RNA, 21 nt, synthetic construct
  source 1..21: mol_type = other RNA
actgcctcgtaacccttttca

SEQ ID NO: 1033 - RNA, 21 nt, synthetic construct
  source 1..21: mol_type = other RNA
cttttcatgatttcaaccaca

SEQ ID NO: 1034 - RNA, 21 nt, synthetic construct
  source 1..21: mol_type = other RNA
gttctccaagtaaagccacga

SEQ ID NO: 1035 - RNA, 21 nt, synthetic construct
  source 1..21: mol_type = other RNA
aaaacttctgatttctcttca

SEQ ID NO: 1036 - RNA, 21 nt, synthetic construct
  source 1..21: mol_type = other RNA
ctgatttctcttcagctttga

SEQ ID NO: 1037 - RNA, 21 nt, synthetic construct
  source 1..21: mol_type = other RNA
ctaatagacttagccccatga

SEQ ID NO: 1038 - RNA, 21 nt, synthetic construct
  source 1..21: mol_type = other RNA
gactatttctggcacttgcaa

SEQ ID NO: 1039 - RNA, 21 nt, synthetic construct
  source 1..21: mol_type = other RNA
agtcccatgatttcttcggta

SEQ ID NO: 1040 - RNA, 21 nt, synthetic construct
  source 1..21: mol_type = other RNA
gcttagctttctgtctgtgaa

SEQ ID NO: 1041 - RNA, 21 nt, synthetic construct
  source 1..21: mol_type = other RNA
tgtgaatgtctatatagtgta

SEQ ID NO: 1042 - RNA, 21 nt, synthetic construct
  source 1..21: mol_type = other RNA
agtgtattgtgtgttttaaca

SEQ ID NO: 1043 - RNA, 21 nt, synthetic construct
  source 1..21: mol_type = other RNA
ttaacaaatgatttacactga

SEQ ID NO: 1044 - RNA, 21 nt, synthetic construct
  source 1..21: mol_type = other RNA
taaaagtgaatttggaaataa

SEQ ID NO: 1045 - RNA, 23 nt, synthetic construct
  source 1..23: mol_type = other RNA
tttcacctgatagtcgacagagg

SEQ ID NO: 1046 - RNA, 23 nt, synthetic construct
  source 1..23: mol_type = other RNA
tgttcaaagttcacctgatagtc

SEQ ID NO: 1047 - RNA, 23 nt, synthetic construct
  source 1..23: mol_type = other RNA
ttggttcaaagttcacctgatag

SEQ ID NO: 1048 - RNA, 23 nt, synthetic construct
  source 1..23: mol_type = other RNA
tcatcctggttcaaagttcacct

SEQ ID NO: 1049 - RNA, 23 nt, synthetic construct
  source 1..23: mol_type = other RNA
tgggctcagccatcctggttcaa

SEQ ID NO: 1050 - RNA, 23 nt, synthetic construct
  source 1..23: mol_type = other RNA
tcggggctcagccatcctggttc

SEQ ID NO: 1051 - RNA, 23 nt, synthetic construct
  source 1..23: mol_type = other RNA
tactcctggcggggctcagccat

SEQ ID NO: 1052 - RNA, 23 nt, synthetic construct
  source 1..23: mol_type = other RNA
tcttcgaactcctggcggggctc

SEQ ID NO: 1053 - RNA, 23 nt, synthetic construct
  source 1..23: mol_type = other RNA
tatcacttcgaactcctggcggg

SEQ ID NO: 1054 - RNA, 23 nt, synthetic construct
  source 1..23: mol_type = other RNA
tttccatcacttcgaactcctgg

SEQ ID NO: 1055 - RNA, 23 nt, synthetic construct
  source 1..23: mol_type = other RNA
ttgatcttccatcacttcgaact

SEQ ID NO: 1056 - RNA, 23 nt, synthetic construct
  source 1..23: mol_type = other RNA
tcgtcccagcgtgatcttccatc

SEQ ID NO: 1057 - RNA, 23 nt, synthetic construct
  source 1..23: mol_type = other RNA
ttacgtcccagcgtgatcttcca

SEQ ID NO: 1058 - RNA, 23 nt, synthetic construct
  source 1..23: mol_type = other RNA
tcgtacgtcccagcgtgatcttc

SEQ ID NO: 1059 - RNA, 23 nt, synthetic construct
  source 1..23: mol_type = other RNA
tccgtacgtcccagcgtgatctt

SEQ ID NO: 1060 - RNA, 23 nt, synthetic construct
  source 1..23: mol_type = other RNA
tccccaacccgtacgtcccagcg

SEQ ID NO: 1061 - RNA, 23 nt, synthetic construct
  source 1..23: mol_type = other RNA
tccctgatctttcctgtccccca

SEQ ID NO: 1062 - RNA, 23 nt, synthetic construct
  source 1..23: mol_type = other RNA
ttgcatggtgtagcccccctgat

SEQ ID NO: 1063 - RNA, 23 nt, synthetic construct
  source 1..23: mol_type = other RNA
tccctcttggtcttggtgcatgg

SEQ ID NO: 1064 - RNA, 23 nt, synthetic construct
  source 1..23: mol_type = other RNA
ttccgtgtcaccctcttggtctt

SEQ ID NO: 1065 - RNA, 23 nt, synthetic construct
  source 1..23: mol_type = other RNA
tcgtccgtgtcaccctcttggtc

SEQ ID NO: 1066 - RNA, 23 nt, synthetic construct
  source 1..23: mol_type = other RNA
tgccagcgtccgtgtcaccctct

SEQ ID NO: 1067 - RNA, 23 nt, synthetic construct
  source 1..23: mol_type = other RNA
tgggagattctttcaggccagcg

SEQ ID NO: 1068 - RNA, 23 nt, synthetic construct
  source 1..23: mol_type = other RNA
tggtctgcaggggagattctttc

SEQ ID NO: 1069 - RNA, 23 nt, synthetic construct
  source 1..23: mol_type = other RNA
tgtcctcagtgggggtctgcagg

SEQ ID NO: 1070 - RNA, 23 nt, synthetic construct
  source 1..23: mol_type = other RNA
tgcccggttcctcagatccgtcc

SEQ ID NO: 1071 - RNA, 23 nt, synthetic construct
  source 1..23: mol_type = other RNA
ttcagaggtttcagagcccggtt

SEQ ID NO: 1072 - RNA, 23 nt, synthetic construct
  source 1..23: mol_type = other RNA
ttcttccaggctgggggtgtctc

SEQ ID NO: 1073 - RNA, 23 nt, synthetic construct
  source 1..23: mol_type = other RNA
tctcctcttgggtcacgtgacca

SEQ ID NO: 1074 - RNA, 23 nt, synthetic construct
  source 1..23: mol_type = other RNA
tggaactctcaactcctcttggg

SEQ ID NO: 1075 - RNA, 23 nt, synthetic construct
  source 1..23: mol_type = other RNA
taggggcctttcaggcgccttcc

SEQ ID NO: 1076 - RNA, 23 nt, synthetic construct
  source 1..23: mol_type = other RNA
tcgctaatctcattggccagggg

SEQ ID NO: 1077 - RNA, 23 nt, synthetic construct
  source 1..23: mol_type = other RNA
tgagaccccagaggcctctccgc

SEQ ID NO: 1078 - RNA, 23 nt, synthetic construct
  source 1..23: mol_type = other RNA
tggagcttctggctctttctccc

SEQ ID NO: 1079 - RNA, 23 nt, synthetic construct
  source 1..23: mol_type = other RNA
tggcgctgggcaaacgggacggt

SEQ ID NO: 1080 - RNA, 23 nt, synthetic construct
  source 1..23: mol_type = other RNA
ttttttgtccccactccagggag

SEQ ID NO: 1081 - RNA, 23 nt, synthetic construct
  source 1..23: mol_type = other RNA
taaaggccggacccttctcggcc

SEQ ID NO: 1082 - RNA, 23 nt, synthetic construct
  source 1..23: mol_type = other RNA
taggctctgtgtggagatacgca

SEQ ID NO: 1083 - RNA, 23 nt, synthetic construct
  source 1..23: mol_type = other RNA
tcaccttaccactttcaggctct

SEQ ID NO: 1084 - RNA, 23 nt, synthetic construct
  source 1..23: mol_type = other RNA
tgccttcctggaccaccttacca

SEQ ID NO: 1085 - RNA, 23 nt, synthetic construct
  source 1..23: mol_type = other RNA
ttggggggcctggctctcggagg

SEQ ID NO: 1086 - RNA, 23 nt, synthetic construct
  source 1..23: mol_type = other RNA
tgaaggttggcgtgtggcctctc

SEQ ID NO: 1087 - RNA, 23 nt, synthetic construct
  source 1..23: mol_type = other RNA
tgccgccctctgtgtcctcaggt

SEQ ID NO: 1088 - RNA, 23 nt, synthetic construct
  source 1..23: mol_type = other RNA
ttcctagaagctggtgcttgagc

SEQ ID NO: 1089 - RNA, 23 nt, synthetic construct
  source 1..23: mol_type = other RNA
ttggtgcaggtctcctagaagct

SEQ ID NO: 1090 - RNA, 23 nt, synthetic construct
  source 1..23: mol_type = other RNA
ttttgccccctgcccccttcagc

SEQ ID NO: 1091 - RNA, 23 nt, synthetic construct
  source 1..23: mol_type = other RNA
tgcggtcttcatccacctcctcc

SEQ ID NO: 1092 - RNA, 23 nt, synthetic construct
  source 1..23: mol_type = other RNA
tgctgtctggggaggccgcccat

SEQ ID NO: 1093 - RNA, 23 nt, synthetic construct
  source 1..23: mol_type = other RNA
tatctctgtggaaactttggaga

SEQ ID NO: 1094 - RNA, 23 nt, synthetic construct
  source 1..23: mol_type = other RNA
tcacgtgaaacgtgaactccagg

SEQ ID NO: 1095 - RNA, 23 nt, synthetic construct
  source 1..23: mol_type = other RNA
tgttgggtgtgatttccacgtga

SEQ ID NO: 1096 - RNA, 23 nt, synthetic construct
  source 1..23: mol_type = other RNA
ttccgagtgcgcctgctccttct

SEQ ID NO: 1097 - RNA, 23 nt, synthetic construct
  source 1..23: mol_type = other RNA
tcagcccttcccaaatgctcctc

SEQ ID NO: 1098 - RNA, 23 nt, synthetic construct
  source 1..23: mol_type = other RNA
tcctcttttgtgtcctctcccaa

SEQ ID NO: 1099 - RNA, 23 nt, synthetic construct
  source 1..23: mol_type = other RNA
tgctctggaaggtcagcctcttt

SEQ ID NO: 1100 - RNA, 23 nt, synthetic construct
  source 1..23: mol_type = other RNA
tgctgcttttcagagggctctgg

SEQ ID NO: 1101 - RNA, 23 nt, synthetic construct
  source 1..23: mol_type = other RNA
tcagcagcaggctgcttttcaga

SEQ ID NO: 1102 - RNA, 23 nt, synthetic construct
  source 1..23: mol_type = other RNA
ttgacgggcttcccccgcggagc

SEQ ID NO: 1103 - RNA, 23 nt, synthetic construct
  source 1..23: mol_type = other RNA
tttttttgtcatcgcttccagtc

SEQ ID NO: 1104 - RNA, 23 nt, synthetic construct
  source 1..23: mol_type = other RNA
ttgtggatgtcttggcttttttg

SEQ ID NO: 1105 - RNA, 23 nt, synthetic construct
  source 1..23: mol_type = other RNA
tcctatttttcaaggttttagca

SEQ ID NO: 1106 - RNA, 23 nt, synthetic construct
  source 1..23: mol_type = other RNA
tggctaaggcaaggcctattttt

SEQ ID NO: 1107 - RNA, 23 nt, synthetic construct
  source 1..23: mol_type = other RNA
tagggtctgagctaccaggagtg

SEQ ID NO: 1108 - RNA, 23 nt, synthetic construct
  source 1..23: mol_type = other RNA
tggttggatcagagggtctgagc

SEQ ID NO: 1109 - RNA, 23 nt, synthetic construct
  source 1..23: mol_type = other RNA
ttgggcacacagcagggctggag

SEQ ID NO: 1110 - RNA, 23 nt, synthetic construct
  source 1..23: mol_type = other RNA
tacgtatttaggagaggaaggtg

SEQ ID NO: 1111 - RNA, 23 nt, synthetic construct
  source 1..23: mol_type = other RNA
tgaagtgacagaagagacgtatt

SEQ ID NO: 1112 - RNA, 23 nt, synthetic construct
  source 1..23: mol_type = other RNA
tgaactgccagttcgggaagtga

SEQ ID NO: 1113 - RNA, 23 nt, synthetic construct
  source 1..23: mol_type = other RNA
tatctcctttgctccagaactgc

SEQ ID NO: 1114 - RNA, 23 nt, synthetic construct
  source 1..23: mol_type = other RNA
tgcccccttgagtttcatctcct

SEQ ID NO: 1115 - RNA, 23 nt, synthetic construct
  source 1..23: mol_type = other RNA
tttcgttttaccatcagccccct

SEQ ID NO: 1116 - RNA, 23 nt, synthetic construct
  source 1..23: mol_type = other RNA
tgcgatcttcgttttaccatcag

SEQ ID NO: 1117 - RNA, 23 nt, synthetic construct
  source 1..23: mol_type = other RNA
ttggcgatcttcgttttaccatc

SEQ ID NO: 1118 - RNA, 23 nt, synthetic construct
  source 1..23: mol_type = other RNA
tgtgtggcgatcttcgttttacc

SEQ ID NO: 1119 - RNA, 23 nt, synthetic construct
  source 1..23: mol_type = other RNA
tcccttctggcctggaggggctg

SEQ ID NO: 1120 - RNA, 23 nt, synthetic construct
  source 1..23: mol_type = other RNA
tgtttttgctggaatcctggtgg

SEQ ID NO: 1121 - RNA, 23 nt, synthetic construct
  source 1..23: mol_type = other RNA
tagcgggcggggtttttgctgga

SEQ ID NO: 1122 - RNA, 23 nt, synthetic construct
  source 1..23: mol_type = other RNA
tgtggtgtctttggagcgggcgg

SEQ ID NO: 1123 - RNA, 23 nt, synthetic construct
  source 1..23: mol_type = other RNA
tgttcaccagagctgggtggtgt

SEQ ID NO: 1124 - RNA, 23 nt, synthetic construct
  source 1..23: mol_type = other RNA
tccgctgcgatcccctgattttg

SEQ ID NO: 1125 - RNA, 23 nt, synthetic construct
  source 1..23: mol_type = other RNA
tcggggtgcgggagcggctgccg

SEQ ID NO: 1126 - RNA, 23 nt, synthetic construct
  source 1..23: mol_type = other RNA
ttggagtacggaccactgccacc

SEQ ID NO: 1127 - RNA, 23 nt, synthetic construct
  source 1..23: mol_type = other RNA
tgcgacttgggtggagtacggac

SEQ ID NO: 1128 - RNA, 23 nt, synthetic construct
  source 1..23: mol_type = other RNA
tgctgtctgcaggcggctcttgg

SEQ ID NO: 1129 - RNA, 23 nt, synthetic construct
  source 1..23: mol_type = other RNA
tttgacattcttcaggtctggca

SEQ ID NO: 1130 - RNA, 23 nt, synthetic construct
  source 1..23: mol_type = other RNA
tgagccgatcttggacttgacat

SEQ ID NO: 1131 - RNA, 23 nt, synthetic construct
  source 1..23: mol_type = other RNA
tttcaggttctcagtggagccga

SEQ ID NO: 1132 - RNA, 23 nt, synthetic construct
  source 1..23: mol_type = other RNA
tttattaattatctgcaccttcc

SEQ ID NO: 1133 - RNA, 23 nt, synthetic construct
  source 1..23: mol_type = other RNA
tctaagatccagcttcttattaa

SEQ ID NO: 1134 - RNA, 23 nt, synthetic construct
  source 1..23: mol_type = other RNA
tttggactggacgttgctaagat

SEQ ID NO: 1135 - RNA, 23 nt, synthetic construct
  source 1..23: mol_type = other RNA
ttcctttgagccacacttggact

SEQ ID NO: 1136 - RNA, 23 nt, synthetic construct
  source 1..23: mol_type = other RNA
tacgtgtttgatattatcctttg

SEQ ID NO: 1137 - RNA, 23 nt, synthetic construct
  source 1..23: mol_type = other RNA
tcactgccgcctcccgggacgtg

SEQ ID NO: 1138 - RNA, 23 nt, synthetic construct
  source 1..23: mol_type = other RNA
tctcaggtcaactggtttgtaga

SEQ ID NO: 1139 - RNA, 23 nt, synthetic construct
  source 1..23: mol_type = other RNA
tttggaggtcaccttgctcaggt

SEQ ID NO: 1140 - RNA, 23 nt, synthetic construct
  source 1..23: mol_type = other RNA
tcctaatgagccacacttggagg

SEQ ID NO: 1141 - RNA, 23 nt, synthetic construct
  source 1..23: mol_type = other RNA
tgccacctcctggtttatgatgg

SEQ ID NO: 1142 - RNA, 23 nt, synthetic construct
  source 1..23: mol_type = other RNA
taagcttctcagattttacttcc

SEQ ID NO: 1143 - RNA, 23 nt, synthetic construct
  source 1..23: mol_type = other RNA
ttctgtccttgaagtcaagcttc

SEQ ID NO: 1144 - RNA, 23 nt, synthetic construct
  source 1..23: mol_type = other RNA
taatcttcgactggactctgtcc

SEQ ID NO: 1145 - RNA, 23 nt, synthetic construct
  source 1..23: mol_type = other RNA
tgacgtgggtgatattgtccagg

SEQ ID NO: 1146 - RNA, 23 nt, synthetic construct
  source 1..23: mol_type = other RNA
tgtcagcttgtgggtttcaatct

SEQ ID NO: 1147 - RNA, 23 nt, synthetic construct
  source 1..23: mol_type = other RNA
tttctcgcggaaggtcagcttgt

SEQ ID NO: 1148 - RNA, 23 nt, synthetic construct
  source 1..23: mol_type = other RNA
tgatctccgccccgtggtctgtc

SEQ ID NO: 1149 - RNA, 23 nt, synthetic construct
  source 1..23: mol_type = other RNA
tccactggcgacttgtacacgat

SEQ ID NO: 1150 - RNA, 23 nt, synthetic construct
  source 1..23: mol_type = other RNA
tgagacattgctgagatgccgtg

SEQ ID NO: 1151 - RNA, 23 nt, synthetic construct
  source 1..23: mol_type = other RNA
tatgtcgatgctgccggtggagg

SEQ ID NO: 1152 - RNA, 23 nt, synthetic construct
  source 1..23: mol_type = other RNA
tgcgagtctaccatgtcgatgct

SEQ ID NO: 1153 - RNA, 23 nt, synthetic construct
  source 1..23: mol_type = other RNA
ttagcgtggcgagctggggcgag

SEQ ID NO: 1154 - RNA, 23 nt, synthetic construct
  source 1..23: mol_type = other RNA
tgacacctcgtcagctagcgtgg

SEQ ID NO: 1155 - RNA, 23 nt, synthetic construct
  source 1..23: mol_type = other RNA
ttgatcacaaaccctgcttggcc

SEQ ID NO: 1156 - RNA, 23 nt, synthetic construct
  source 1..23: mol_type = other RNA
tccgccccaggggcctgatcaca

SEQ ID NO: 1157 - RNA, 23 nt, synthetic construct
  source 1..23: mol_type = other RNA
tctctccacaattattgaccgcc

SEQ ID NO: 1158 - RNA, 23 nt, synthetic construct
  source 1..23: mol_type = other RNA
tctctctcattctctcctctcca

SEQ ID NO: 1159 - RNA, 23 nt, synthetic construct
  source 1..23: mol_type = other RNA
tccgggtcattattctttttttt

SEQ ID NO: 1160 - RNA, 23 nt, synthetic construct
  source 1..23: mol_type = other RNA
tagctgggggcagagggcggggg

SEQ ID NO: 1161 - RNA, 23 nt, synthetic construct
  source 1..23: mol_type = other RNA
taccaattaaccgaactgcgagg

SEQ ID NO: 1162 - RNA, 23 nt, synthetic construct
  source 1..23: mol_type = other RNA
tcaggttaagtgattaaccaatt

SEQ ID NO: 1163 - RNA, 23 nt, synthetic construct
  source 1..23: mol_type = other RNA
tgccgagtgacaaaagcaggtta

SEQ ID NO: 1164 - RNA, 23 nt, synthetic construct
  source 1..23: mol_type = other RNA
taagtcccgagccaaagccgagt

SEQ ID NO: 1165 - RNA, 23 nt, synthetic construct
  source 1..23: mol_type = other RNA
tccatcactgattttgaagtccc

SEQ ID NO: 1166 - RNA, 23 nt, synthetic construct
  source 1..23: mol_type = other RNA
taatttgctcttactcccatcac

SEQ ID NO: 1167 - RNA, 23 nt, synthetic construct
  source 1..23: mol_type = other RNA
taatttggaaagatgaaatttgc

SEQ ID NO: 1168 - RNA, 23 nt, synthetic construct
  source 1..23: mol_type = other RNA
taatattttattactagcccacc

SEQ ID NO: 1169 - RNA, 23 nt, synthetic construct
  source 1..23: mol_type = other RNA
tatgtttttttttaaatatttta

SEQ ID NO: 1170 - RNA, 23 nt, synthetic construct
  source 1..23: mol_type = other RNA
tatgtggccatgtttttgaatgt

SEQ ID NO: 1171 - RNA, 23 nt, synthetic construct
  source 1..23: mol_type = other RNA
tctgaggaaatgttggatgtggc

SEQ ID NO: 1172 - RNA, 23 nt, synthetic construct
  source 1..23: mol_type = other RNA
tatcaaaaggaattgcctgagga

SEQ ID NO: 1173 - RNA, 23 nt, synthetic construct
  source 1..23: mol_type = other RNA
tggggaagaaaaaagaatcaaaa

SEQ ID NO: 1174 - RNA, 23 nt, synthetic construct
  source 1..23: mol_type = other RNA
tctcttctacatggagggggaag

SEQ ID NO: 1175 - RNA, 23 nt, synthetic construct
  source 1..23: mol_type = other RNA
tagcctctccttctccctcttct

SEQ ID NO: 1176 - RNA, 23 nt, synthetic construct
  source 1..23: mol_type = other RNA
tagaagcagctttcagagcctct

SEQ ID NO: 1177 - RNA, 23 nt, synthetic construct
  source 1..23: mol_type = other RNA
tcttgaaatcccccagaagcagc

SEQ ID NO: 1178 - RNA, 23 nt, synthetic construct
  source 1..23: mol_type = other RNA
tcccccagtcccttgaaatcccc

SEQ ID NO: 1179 - RNA, 23 nt, synthetic construct
  source 1..23: mol_type = other RNA
tcccacaacagggccagaggtgg

SEQ ID NO: 1180 - RNA, 23 nt, synthetic construct
  source 1..23: mol_type = other RNA
tcaccaagtttcaaatcctttgt

SEQ ID NO: 1181 - RNA, 23 nt, synthetic construct
  source 1..23: mol_type = other RNA
tgctccacgaacacaccaagttt

SEQ ID NO: 1182 - RNA, 23 nt, synthetic construct
  source 1..23: mol_type = other RNA
tgtctgcctgtggctccacgaac

SEQ ID NO: 1183 - RNA, 23 nt, synthetic construct
  source 1..23: mol_type = other RNA
tcacaaggttgacatcgtctgcc

SEQ ID NO: 1184 - RNA, 23 nt, synthetic construct
  source 1..23: mol_type = other RNA
tctctcccactcccacttcttgt

SEQ ID NO: 1185 - RNA, 23 nt, synthetic construct
  source 1..23: mol_type = other RNA
tcacgtggcttcctctcccactc

SEQ ID NO: 1186 - RNA, 23 nt, synthetic construct
  source 1..23: mol_type = other RNA
tgatgtctactctccagcacgtg

SEQ ID NO: 1187 - RNA, 23 nt, synthetic construct
  source 1..23: mol_type = other RNA
taaggagggggatgtctactctc

SEQ ID NO: 1188 - RNA, 23 nt, synthetic construct
  source 1..23: mol_type = other RNA
tcccccggccaccaaggacaggc

SEQ ID NO: 1189 - RNA, 23 nt, synthetic construct
  source 1..23: mol_type = other RNA
tgaagtgccaccctcctgccagc

SEQ ID NO: 1190 - RNA, 23 nt, synthetic construct
  source 1..23: mol_type = other RNA
tcatcaaggtcagtcttttctaa

SEQ ID NO: 1191 - RNA, 23 nt, synthetic construct
  source 1..23: mol_type = other RNA
tcagcgctctcaagacatcaagg

SEQ ID NO: 1192 - RNA, 23 nt, synthetic construct
  source 1..23: mol_type = other RNA
tacagggtttctgtggagcagag

SEQ ID NO: 1193 - RNA, 23 nt, synthetic construct
  source 1..23: mol_type = other RNA
tcagcagttccaaccttcagaac

SEQ ID NO: 1194 - RNA, 23 nt, synthetic construct
  source 1..23: mol_type = other RNA
ttggccaaaatcatggcagcagt

SEQ ID NO: 1195 - RNA, 23 nt, synthetic construct
  source 1..23: mol_type = other RNA
tcttacaaagagaactggttagc

SEQ ID NO: 1196 - RNA, 23 nt, synthetic construct
  source 1..23: mol_type = other RNA
tcaagaggcacaagtccttacaa

SEQ ID NO: 1197 - RNA, 23 nt, synthetic construct
  source 1..23: mol_type = other RNA
tgtggacgtctcccaagaggcac

SEQ ID NO: 1198 - RNA, 23 nt, synthetic construct
  source 1..23: mol_type = other RNA
tggcttggaaacgggtggacgtc

SEQ ID NO: 1199 - RNA, 23 nt, synthetic construct
  source 1..23: mol_type = other RNA
tagtggcccaggcttggaaacgg

SEQ ID NO: 1200 - RNA, 23 nt, synthetic construct
  source 1..23: mol_type = other RNA
tgagatgccagtggcccaggctt

SEQ ID NO: 1201 - RNA, 23 nt, synthetic construct
  source 1..23: mol_type = other RNA
tcccacacactccagagatgcca

SEQ ID NO: 1202 - RNA, 23 nt, synthetic construct
  source 1..23: mol_type = other RNA
tagtggccgtgggaaggacaggg

SEQ ID NO: 1203 - RNA, 23 nt, synthetic construct
  source 1..23: mol_type = other RNA
tcgtgtgatgaggggtataggca

SEQ ID NO: 1204 - RNA, 23 nt, synthetic construct
  source 1..23: mol_type = other RNA
tttcgggacattgtgacgtgtga

SEQ ID NO: 1205 - RNA, 23 nt, synthetic construct
  source 1..23: mol_type = other RNA
tccaaccagggtcattactgaga

SEQ ID NO: 1206 - RNA, 23 nt, synthetic construct
  source 1..23: mol_type = other RNA
tccctcagtatggagtaggtacc

SEQ ID NO: 1207 - RNA, 23 nt, synthetic construct
  source 1..23: mol_type = other RNA
tcttcccttaatttcaccctcag

SEQ ID NO: 1208 - RNA, 23 nt, synthetic construct
  source 1..23: mol_type = other RNA
tgaggctggggtcccactcttgt

SEQ ID NO: 1209 - RNA, 23 nt, synthetic construct
  source 1..23: mol_type = other RNA
tggtcccagttggatgagtggaa

SEQ ID NO: 1210 - RNA, 23 nt, synthetic construct
  source 1..23: mol_type = other RNA
tgattcgtggtgagggtcccagt

SEQ ID NO: 1211 - RNA, 23 nt, synthetic construct
  source 1..23: mol_type = other RNA
tcgaatcagatcatgagattcgt

SEQ ID NO: 1212 - RNA, 23 nt, synthetic construct
  source 1..23: mol_type = other RNA
tgagacagggaaccgaatcagat

SEQ ID NO: 1213 - RNA, 23 nt, synthetic construct
  source 1..23: mol_type = other RNA
ttgacgggaggaggagacaggga

SEQ ID NO: 1214 - RNA, 23 nt, synthetic construct
  source 1..23: mol_type = other RNA
ttggctcacatctgtgacgggag

SEQ ID NO: 1215 - RNA, 23 nt, synthetic construct
  source 1..23: mol_type = other RNA
tcagctgagcagtgccctggctc

SEQ ID NO: 1216 - RNA, 23 nt, synthetic construct
  source 1..23: mol_type = other RNA
tagaaacacctagggtcacagct

SEQ ID NO: 1217 - RNA, 23 nt, synthetic construct
  source 1..23: mol_type = other RNA
tgggaaagggctctctccatgtc

SEQ ID NO: 1218 - RNA, 23 nt, synthetic construct
  source 1..23: mol_type = other RNA
tccactgacaaccaagacaccca

SEQ ID NO: 1219 - RNA, 23 nt, synthetic construct
  source 1..23: mol_type = other RNA
ttcctggtgccaccactgacaac

SEQ ID NO: 1220 - RNA, 23 nt, synthetic construct
  source 1..23: mol_type = other RNA
tactgtgggcctgccctgggtgc

SEQ ID NO: 1221 - RNA, 23 nt, synthetic construct
  source 1..23: mol_type = other RNA
tgcagcgggctgggctgtctggg

SEQ ID NO: 1222 - RNA, 23 nt, synthetic construct
  source 1..23: mol_type = other RNA
ttgatactatgcatgtggagctg

SEQ ID NO: 1223 - RNA, 23 nt, synthetic construct
  source 1..23: mol_type = other RNA
tgggtgtggagggctgatactat

SEQ ID NO: 1224 - RNA, 23 nt, synthetic construct
  source 1..23: mol_type = other RNA
taagggggtgtgttcccctttgt

SEQ ID NO: 1225 - RNA, 23 nt, synthetic construct
  source 1..23: mol_type = other RNA
taaaagaaccatttccaaggggg

SEQ ID NO: 1226 - RNA, 23 nt, synthetic construct
  source 1..23: mol_type = other RNA
tctgggactgggggaaaagaacc

SEQ ID NO: 1227 - RNA, 23 nt, synthetic construct
  source 1..23: mol_type = other RNA
tcatggcttccagctgggactgg

SEQ ID NO: 1228 - RNA, 23 nt, synthetic construct
  source 1..23: mol_type = other RNA
tcagcagaacagacagcatggct

SEQ ID NO: 1229 - RNA, 23 nt, synthetic construct
  source 1..23: mol_type = other RNA
ttatgttcagctgctccagcaga

SEQ ID NO: 1230 - RNA, 23 nt, synthetic construct
  source 1..23: mol_type = other RNA
tggcaacatctatgtatatgttc

SEQ ID NO: 1231 - RNA, 23 nt, synthetic construct
  source 1..23: mol_type = other RNA
ttgcagatggggagggcagggca

SEQ ID NO: 1232 - RNA, 23 nt, synthetic construct
  source 1..23: mol_type = other RNA
tactacaactcaacagggtgcag

SEQ ID NO: 1233 - RNA, 23 nt, synthetic construct
  source 1..23: mol_type = other RNA
ttatcatagtcactctggtgaat

SEQ ID NO: 1234 - RNA, 23 nt, synthetic construct
  source 1..23: mol_type = other RNA
tggttagaaacctctttacaagc

SEQ ID NO: 1235 - RNA, 23 nt, synthetic construct
  source 1..23: mol_type = other RNA
tctcgtgagggtgggttagaaac

SEQ ID NO: 1236 - RNA, 23 nt, synthetic construct
  source 1..23: mol_type = other RNA
tcagtgtgggggtgagagacacc

SEQ ID NO: 1237 - RNA, 23 nt, synthetic construct
  source 1..23: mol_type = other RNA
tacaggccacacgagtcccagtg

SEQ ID NO: 1238 - RNA, 23 nt, synthetic construct
  source 1..23: mol_type = other RNA
tcagcagggtggcaccacacagg

SEQ ID NO: 1239 - RNA, 23 nt, synthetic construct
  source 1..23: mol_type = other RNA
tagcctttcaaaacttgggaggc

SEQ ID NO: 1240 - RNA, 23 nt, synthetic construct
  source 1..23: mol_type = other RNA
tcaggtgctgaggaaagcctttc

SEQ ID NO: 1241 - RNA, 23 nt, synthetic construct
  source 1..23: mol_type = other RNA
ttctctgttgggtcccaggtgct

SEQ ID NO: 1242 - RNA, 23 nt, synthetic construct
  source 1..23: mol_type = other RNA
tgctgctagaagctggtctctgt

SEQ ID NO: 1243 - RNA, 23 nt, synthetic construct
  source 1..23: mol_type = other RNA
ttgaacggcctccttagctgcta

SEQ ID NO: 1244 - RNA, 23 nt, synthetic construct
  source 1..23: mol_type = other RNA
tgccttcgtcacagctgaacggc

SEQ ID NO: 1245 - RNA, 23 nt, synthetic construct
  source 1..23: mol_type = other RNA
tatcctgtgcttcaggccttcgt

SEQ ID NO: 1246 - RNA, 23 nt, synthetic construct
  source 1..23: mol_type = other RNA
tatcgcttcagtcctaatcctgt

SEQ ID NO: 1247 - RNA, 23 nt, synthetic construct
  source 1..23: mol_type = other RNA
tcacagggagccccaaggggaag

SEQ ID NO: 1248 - RNA, 23 nt, synthetic construct
  source 1..23: mol_type = other RNA
taagacctagtctgtgccctgac

SEQ ID NO: 1249 - RNA, 23 nt, synthetic construct
  source 1..23: mol_type = other RNA
tagaccagccacaagacctagtc

SEQ ID NO: 1250 - RNA, 23 nt, synthetic construct
  source 1..23: mol_type = other RNA
tatcctcgcgccgcaagccagac

SEQ ID NO: 1251 - RNA, 23 nt, synthetic construct
  source 1..23: mol_type = other RNA
tgggctatgaccagagagaacca

SEQ ID NO: 1252 - RNA, 23 nt, synthetic construct
  source 1..23: mol_type = other RNA
tctgccatgagacttcgggctat

SEQ ID NO: 1253 - RNA, 23 nt, synthetic construct
  source 1..23: mol_type = other RNA
ttgatgcaggagttgtaagcctc

SEQ ID NO: 1254 - RNA, 23 nt, synthetic construct
  source 1..23: mol_type = other RNA
tgcttcctttttcttgtgatgca

SEQ ID NO: 1255 - RNA, 23 nt, synthetic construct
  source 1..23: mol_type = other RNA
tgctggcagtggcttcctttttc

SEQ ID NO: 1256 - RNA, 23 nt, synthetic construct
  source 1..23: mol_type = other RNA
tgagctgcagatccccccagctg

SEQ ID NO: 1257 - RNA, 23 nt, synthetic construct
  source 1..23: mol_type = other RNA
tctcacggagcttctgggagctg

SEQ ID NO: 1258 - RNA, 23 nt, synthetic construct
  source 1..23: mol_type = other RNA
ttgaggggtggctgaggctcacg

SEQ ID NO: 1259 - RNA, 23 nt, synthetic construct
  source 1..23: mol_type = other RNA
tcttggagaggaacccagtctga

SEQ ID NO: 1260 - RNA, 23 nt, synthetic construct
  source 1..23: mol_type = other RNA
tggcaattcatcccaatccctgc

SEQ ID NO: 1261 - RNA, 23 nt, synthetic construct
  source 1..23: mol_type = other RNA
tagcagatccaggacaggcaatt

SEQ ID NO: 1262 - RNA, 23 nt, synthetic construct
  source 1..23: mol_type = other RNA
taggcaggcagcttgggcctcta

SEQ ID NO: 1263 - RNA, 23 nt, synthetic construct
  source 1..23: mol_type = other RNA
ttgtctcctgacttgtcaagtca

SEQ ID NO: 1264 - RNA, 23 nt, synthetic construct
  source 1..23: mol_type = other RNA
taggctttgggaacagtgtctcc

SEQ ID NO: 1265 - RNA, 23 nt, synthetic construct
  source 1..23: mol_type = other RNA
tgtgctctggtcaaggctttggg

SEQ ID NO: 1266 - RNA, 23 nt, synthetic construct
  source 1..23: mol_type = other RNA
ttcagcgggctgaggtgctctgg

SEQ ID NO: 1267 - RNA, 23 nt, synthetic construct
  source 1..23: mol_type = other RNA
tatggagtttgtgcaaggtcagc

SEQ ID NO: 1268 - RNA, 23 nt, synthetic construct
  source 1..23: mol_type = other RNA
taaggcggcttcccttttctcat

SEQ ID NO: 1269 - RNA, 23 nt, synthetic construct
  source 1..23: mol_type = other RNA
tcagcaatgttttgcaaaggcgg

SEQ ID NO: 1270 - RNA, 23 nt, synthetic construct
  source 1..23: mol_type = other RNA
tctgagtttctttaggcagcaat

SEQ ID NO: 1271 - RNA, 23 nt, synthetic construct
  source 1..23: mol_type = other RNA
tagtggcagaattgggcctgagg

SEQ ID NO: 1272 - RNA, 23 nt, synthetic construct
  source 1..23: mol_type = other RNA
ttgtacccaaaccagaagtggca

SEQ ID NO: 1273 - RNA, 23 nt, synthetic construct
  source 1..23: mol_type = other RNA
tagggttgcctttaactgtaccc

SEQ ID NO: 1274 - RNA, 23 nt, synthetic construct
  source 1..23: mol_type = other RNA
tgccctggatttctactgccaag

SEQ ID NO: 1275 - RNA, 23 nt, synthetic construct
  source 1..23: mol_type = other RNA
tagctgccagccccaggggaggc

SEQ ID NO: 1276 - RNA, 23 nt, synthetic construct
  source 1..23: mol_type = other RNA
ttaaagctctagctgcacacgaa

SEQ ID NO: 1277 - RNA, 23 nt, synthetic construct
  source 1..23: mol_type = other RNA
tagacttcctttcaggtaaagct

SEQ ID NO: 1278 - RNA, 23 nt, synthetic construct
  source 1..23: mol_type = other RNA
tttctgggcccagagacttcctt

SEQ ID NO: 1279 - RNA, 23 nt, synthetic construct
  source 1..23: mol_type = other RNA
tttggtggagagttctgggccca

SEQ ID NO: 1280 - RNA, 23 nt, synthetic construct
  source 1..23: mol_type = other RNA
tggaggctcttggtggagagttc

SEQ ID NO: 1281 - RNA, 23 nt, synthetic construct
  source 1..23: mol_type = other RNA
ttttccttctccttctcagatcc

SEQ ID NO: 1282 - RNA, 23 nt, synthetic construct
  source 1..23: mol_type = other RNA
tcaaatctaccccacatttcctt

SEQ ID NO: 1283 - RNA, 23 nt, synthetic construct
  source 1..23: mol_type = other RNA
ttaatgaggggggcatatctcta

SEQ ID NO: 1284 - RNA, 23 nt, synthetic construct
  source 1..23: mol_type = other RNA
tcgaaactgttggcagtaatgag

SEQ ID NO: 1285 - RNA, 23 nt, synthetic construct
  source 1..23: mol_type = other RNA
tgtgaagaaatgcagccgaaact

SEQ ID NO: 1286 - RNA, 23 nt, synthetic construct
  source 1..23: mol_type = other RNA
tgaggaaccgaggtgcgtgaaga

SEQ ID NO: 1287 - RNA, 23 nt, synthetic construct
  source 1..23: mol_type = other RNA
tcaagaacttcaggaagaggaac

SEQ ID NO: 1288 - RNA, 23 nt, synthetic construct
  source 1..23: mol_type = other RNA
ttgaagagcagggcacaagaact

SEQ ID NO: 1289 - RNA, 23 nt, synthetic construct
  source 1..23: mol_type = other RNA
taggcccatggtgctgaagagca

SEQ ID NO: 1290 - RNA, 23 nt, synthetic construct
  source 1..23: mol_type = other RNA
tgccttccgtataagaaggccca

SEQ ID NO: 1291 - RNA, 23 nt, synthetic construct
  source 1..23: mol_type = other RNA
tgatcccagagccttccgtataa

SEQ ID NO: 1292 - RNA, 23 nt, synthetic construct
  source 1..23: mol_type = other RNA
tgagcctgccccacaagggggag

SEQ ID NO: 1293 - RNA, 23 nt, synthetic construct
  source 1..23: mol_type = other RNA
tagcactgatcaccctaaaccat

SEQ ID NO: 1294 - RNA, 23 nt, synthetic construct
  source 1..23: mol_type = other RNA
taagccagcgtgccttttcaatt

SEQ ID NO: 1295 - RNA, 23 nt, synthetic construct
  source 1..23: mol_type = other RNA
tctcatttaagatcacaagccag

SEQ ID NO: 1296 - RNA, 23 nt, synthetic construct
  source 1..23: mol_type = other RNA
tgggggattgtcctcatttaaga

SEQ ID NO: 1297 - RNA, 23 nt, synthetic construct
  source 1..23: mol_type = other RNA
tgggaggagtgcccagccctggg

SEQ ID NO: 1298 - RNA, 23 nt, synthetic construct
  source 1..23: mol_type = other RNA
tcactggctctgcaggtgggaga

SEQ ID NO: 1299 - RNA, 23 nt, synthetic construct
  source 1..23: mol_type = other RNA
ttatcctatctagcccacccaag

SEQ ID NO: 1300 - RNA, 23 nt, synthetic construct
  source 1..23: mol_type = other RNA
tagccggcatacagtatatccta

SEQ ID NO: 1301 - RNA, 23 nt, synthetic construct
  source 1..23: mol_type = other RNA
ttcagcagcttgaaggagccggc

SEQ ID NO: 1302 - RNA, 23 nt, synthetic construct
  source 1..23: mol_type = other RNA
ttattgataaagtgagtcagcag

SEQ ID NO: 1303 - RNA, 23 nt, synthetic construct
  source 1..23: mol_type = other RNA
ttctcaccactgaagtcaattta

SEQ ID NO: 1304 - RNA, 23 nt, synthetic construct
  source 1..23: mol_type = other RNA
tgcaaacaggatacagtctcacc

SEQ ID NO: 1305 - RNA, 23 nt, synthetic construct
  source 1..23: mol_type = other RNA
tgcacaacaagcaatagcaaaca

SEQ ID NO: 1306 - RNA, 23 nt, synthetic construct
  source 1..23: mol_type = other RNA
ttccctttgcccatgttaactat

SEQ ID NO: 1307 - RNA, 23 nt, synthetic construct
  source 1..23: mol_type = other RNA
tctgcaccccaagatctcccttt

SEQ ID NO: 1308 - RNA, 23 nt, synthetic construct
  source 1..23: mol_type = other RNA
tgaggcagtttaagtgctgcacc

SEQ ID NO: 1309 - RNA, 23 nt, synthetic construct
  source 1..23: mol_type = other RNA
taaatgtggttgaaatcatgaaa

SEQ ID NO: 1310 - RNA, 23 nt, synthetic construct
  source 1..23: mol_type = other RNA
ttctaactccgtggctgctccct

SEQ ID NO: 1311 - RNA, 23 nt, synthetic construct
  source 1..23: mol_type = other RNA
taaagagaaaccccaagggcctc

SEQ ID NO: 1312 - RNA, 23 nt, synthetic construct
  source 1..23: mol_type = other RNA
tagcctgtcagtggaaaagagaa

SEQ ID NO: 1313 - RNA, 23 nt, synthetic construct
  source 1..23: mol_type = other RNA
tcagctgcctgggaaagcctgtc

SEQ ID NO: 1314 - RNA, 23 nt, synthetic construct
  source 1..23: mol_type = other RNA
tagggaatgaactagccagctgc

SEQ ID NO: 1315 - RNA, 23 nt, synthetic construct
  source 1..23: mol_type = other RNA
tcctgcacctggctggggaggga

SEQ ID NO: 1316 - RNA, 23 nt, synthetic construct
  source 1..23: mol_type = other RNA
ttgtccatattcctacgcctgca

SEQ ID NO: 1317 - RNA, 23 nt, synthetic construct
  source 1..23: mol_type = other RNA
tccaaagcaaccagatgtccata

SEQ ID NO: 1318 - RNA, 23 nt, synthetic construct
  source 1..23: mol_type = other RNA
tgagggcagcaggccaaagcaac

SEQ ID NO: 1319 - RNA, 23 nt, synthetic construct
  source 1..23: mol_type = other RNA
tggacccctgaaagagggcagca

SEQ ID NO: 1320 - RNA, 23 nt, synthetic construct
  source 1..23: mol_type = other RNA
tatgattgtgggcttaggacccc

SEQ ID NO: 1321 - RNA, 23 nt, synthetic construct
  source 1..23: mol_type = other RNA
taggtcttagggaggcatgattg

SEQ ID NO: 1322 - RNA, 23 nt, synthetic construct
  source 1..23: mol_type = other RNA
tgagggaaggatgccaaggtctt

SEQ ID NO: 1323 - RNA, 23 nt, synthetic construct
  source 1..23: mol_type = other RNA
tgtgccaacggcttagagggaag

SEQ ID NO: 1324 - RNA, 23 nt, synthetic construct
  source 1..23: mol_type = other RNA
taggtggcacagaggtgccaacg

SEQ ID NO: 1325 - RNA, 23 nt, synthetic construct
  source 1..23: mol_type = other RNA
tacaggctgtgtgtctggagcca

SEQ ID NO: 1326 - RNA, 23 nt, synthetic construct
  source 1..23: mol_type = other RNA
tggtgaagcgagtgatctcagct

SEQ ID NO: 1327 - RNA, 23 nt, synthetic construct
  source 1..23: mol_type = other RNA
taacaaagatgaggagggtgaag

SEQ ID NO: 1328 - RNA, 23 nt, synthetic construct
  source 1..23: mol_type = other RNA
ttggctttacttggagaacaaag

SEQ ID NO: 1329 - RNA, 23 nt, synthetic construct
  source 1..23: mol_type = other RNA
tagaaatcagaagttttatgaag

SEQ ID NO: 1330 - RNA, 23 nt, synthetic construct
  source 1..23: mol_type = other RNA
tttttcaaagctgaagagaaatc

SEQ ID NO: 1331 - RNA, 23 nt, synthetic construct
  source 1..23: mol_type = other RNA
tcccagggtaacccttttcaaag

SEQ ID NO: 1332 - RNA, 23 nt, synthetic construct
  source 1..23: mol_type = other RNA
tggctctaggccagtgcccaggg

SEQ ID NO: 1333 - RNA, 23 nt, synthetic construct
  source 1..23: mol_type = other RNA
tagtctattaggaggtgaggctc

SEQ ID NO: 1334 - RNA, 23 nt, synthetic construct
  source 1..23: mol_type = other RNA
taaactcatggggctaagtctat

SEQ ID NO: 1335 - RNA, 23 nt, synthetic construct
  source 1..23: mol_type = other RNA
tagtgccagaaatagtcctgctc

SEQ ID NO: 1336 - RNA, 23 nt, synthetic construct
  source 1..23: mol_type = other RNA
tatcatgggacttgcaagtgcca

SEQ ID NO: 1337 - RNA, 23 nt, synthetic construct
  source 1..23: mol_type = other RNA
tagaattaccgaagaaatcatgg

SEQ ID NO: 1338 - RNA, 23 nt, synthetic construct
  source 1..23: mol_type = other RNA
tcccaccctcagaattaccgaag

SEQ ID NO: 1339 - RNA, 23 nt, synthetic construct
  source 1..23: mol_type = other RNA
tctaagatgatttcatgtccctc

SEQ ID NO: 1340 - RNA, 23 nt, synthetic construct
  source 1..23: mol_type = other RNA
tagacagaaagctaagctaagat

SEQ ID NO: 1341 - RNA, 23 nt, synthetic construct
  source 1..23: mol_type = other RNA
ttatatagacattcacagacaga

SEQ ID NO: 1342 - RNA, 23 nt, synthetic construct
  source 1..23: mol_type = other RNA
taaacacacaatacactatatag

SEQ ID NO: 1343 - RNA, 23 nt, synthetic construct
  source 1..23: mol_type = other RNA
taaagttcacctgatagtcgaca

SEQ ID NO: 1344 - RNA, 23 nt, synthetic construct
  source 1..23: mol_type = other RNA
tctggttcaaagttcacctgata

SEQ ID NO: 1345 - RNA, 23 nt, synthetic construct
  source 1..23: mol_type = other RNA
ttcttccatcacttcgaactcct

SEQ ID NO: 1346 - RNA, 23 nt, synthetic construct
  source 1..23: mol_type = other RNA
taactttggagaggaaatccaca

SEQ ID NO: 1347 - RNA, 23 nt, synthetic construct
  source 1..23: mol_type = other RNA
tatttccacgtgaaacgtgaact

SEQ ID NO: 1348 - RNA, 23 nt, synthetic construct
  source 1..23: mol_type = other RNA
ttctttgcttttactgaccatgc

SEQ ID NO: 1349 - RNA, 23 nt, synthetic construct
  source 1..23: mol_type = other RNA
tgatgtcttggcttttttgtcat

SEQ ID NO: 1350 - RNA, 23 nt, synthetic construct
  source 1..23: mol_type = other RNA
tcgtgtggatgtcttggcttttt

SEQ ID NO: 1351 - RNA, 23 nt, synthetic construct
  source 1..23: mol_type = other RNA
tcaaggcctatttttcaaggttt

SEQ ID NO: 1352 - RNA, 23 nt, synthetic construct
  source 1..23: mol_type = other RNA
tgacgtatttaggagaggaaggt

SEQ ID NO: 1353 - RNA, 23 nt, synthetic construct
  source 1..23: mol_type = other RNA
tgtgacagaagagacgtatttag

SEQ ID NO: 1354 - RNA, 23 nt, synthetic construct
  source 1..23: mol_type = other RNA
tttaattatctgcaccttcccgc

SEQ ID NO: 1355 - RNA, 23 nt, synthetic construct
  source 1..23: mol_type = other RNA
tcttcttattaattatctgcacc

SEQ ID NO: 1356 - RNA, 23 nt, synthetic construct
  source 1..23: mol_type = other RNA
tagatccagcttcttattaatta

SEQ ID NO: 1357 - RNA, 23 nt, synthetic construct
  source 1..23: mol_type = other RNA
tcgttgctaagatccagcttctt

SEQ ID NO: 1358 - RNA, 23 nt, synthetic construct
  source 1..23: mol_type = other RNA
tgggacgtgtttgatattatcct

SEQ ID NO: 1359 - RNA, 23 nt, synthetic construct
  source 1..23: mol_type = other RNA
ttggtttgtagactatttgcaca

SEQ ID NO: 1360 - RNA, 23 nt, synthetic construct
  source 1..23: mol_type = other RNA
tagtcaagcttctcagattttac

SEQ ID NO: 1361 - RNA, 23 nt, synthetic construct
  source 1..23: mol_type = other RNA
tctctgtccttgaagtcaagctt

SEQ ID NO: 1362 - RNA, 23 nt, synthetic construct
  source 1..23: mol_type = other RNA
taatctttttatttcctccgcca

SEQ ID NO: 1363 - RNA, 23 nt, synthetic construct
  source 1..23: mol_type = other RNA
tgcttgtgggtttcaatcttttt

SEQ ID NO: 1364 - RNA, 23 nt, synthetic construct
  source 1..23: mol_type = other RNA
ttctcctctccacaattattgac

SEQ ID NO: 1365 - RNA, 23 nt, synthetic construct
  source 1..23: mol_type = other RNA
tttaagtgattaaccaattaacc

SEQ ID NO: 1366 - RNA, 23 nt, synthetic construct
  source 1..23: mol_type = other RNA
tctcccatcactgattttgaagt

SEQ ID NO: 1367 - RNA, 23 nt, synthetic construct
  source 1..23: mol_type = other RNA
tatgaaatttgctcttactccca

SEQ ID NO: 1368 - RNA, 23 nt, synthetic construct
  source 1..23: mol_type = other RNA
tcatcaatttggaaagatgaaat

SEQ ID NO: 1369 - RNA, 23 nt, synthetic construct
  source 1..23: mol_type = other RNA
tttactagcccacccatcaattt

SEQ ID NO: 1370 - RNA, 23 nt, synthetic construct
  source 1..23: mol_type = other RNA
ttggccatgtttttgaatgtttt

SEQ ID NO: 1371 - RNA, 23 nt, synthetic construct
  source 1..23: mol_type = other RNA
tttggatgtggccatgtttttga

SEQ ID NO: 1372 - RNA, 23 nt, synthetic construct
  source 1..23: mol_type = other RNA
tattgcctgaggaaatgttggat

SEQ ID NO: 1373 - RNA, 23 nt, synthetic construct
  source 1..23: mol_type = other RNA
taaaggaattgcctgaggaaatg

SEQ ID NO: 1374 - RNA, 23 nt, synthetic construct
  source 1..23: mol_type = other RNA
taagaatcaaaaggaattgcctg

SEQ ID NO: 1375 - RNA, 23 nt, synthetic construct
  source 1..23: mol_type = other RNA
tgaagaaaaaagaatcaaaagga

SEQ ID NO: 1376 - RNA, 23 nt, synthetic construct
  source 1..23: mol_type = other RNA
tcaagtttcaaatcctttgttgc

SEQ ID NO: 1377 - RNA, 23 nt, synthetic construct
  source 1..23: mol_type = other RNA
taacacaccaagtttcaaatcct

SEQ ID NO: 1378 - RNA, 23 nt, synthetic construct
  source 1..23: mol_type = other RNA
tgtcttttctaaggaggtcatcc

SEQ ID NO: 1379 - RNA, 23 nt, synthetic construct
  source 1..23: mol_type = other RNA
taggtcagtcttttctaaggagg

SEQ ID NO: 1380 - RNA, 23 nt, synthetic construct
  source 1..23: mol_type = other RNA
tataaaacagggtttctgtggag

SEQ ID NO: 1381 - RNA, 23 nt, synthetic construct
  source 1..23: mol_type = other RNA
tgaactcaataaaacagggtttc

SEQ ID NO: 1382 - RNA, 23 nt, synthetic construct
  source 1..23: mol_type = other RNA
taccttcagaactcaataaaaca

SEQ ID NO: 1383 - RNA, 23 nt, synthetic construct
  source 1..23: mol_type = other RNA
tagttccaaccttcagaactcaa

SEQ ID NO: 1384 - RNA, 23 nt, synthetic construct
  source 1..23: mol_type = other RNA
tcaaagagaactggttagcccta

SEQ ID NO: 1385 - RNA, 23 nt, synthetic construct
  source 1..23: mol_type = other RNA
tagtccttacaaagagaactggt

SEQ ID NO: 1386 - RNA, 23 nt, synthetic construct
  source 1..23: mol_type = other RNA
tagaggcacaagtccttacaaag

SEQ ID NO: 1387 - RNA, 23 nt, synthetic construct
  source 1..23: mol_type = other RNA
ttcagatcatgagattcgtggtg

SEQ ID NO: 1388 - RNA, 23 nt, synthetic construct
  source 1..23: mol_type = other RNA
tgaaccgaatcagatcatgagat

SEQ ID NO: 1389 - RNA, 23 nt, synthetic construct
  source 1..23: mol_type = other RNA
taaagaaccatttccaagggggt

SEQ ID NO: 1390 - RNA, 23 nt, synthetic construct
  source 1..23: mol_type = other RNA
ttatgtatatgttcagctgctcc

SEQ ID NO: 1391 - RNA, 23 nt, synthetic construct
  source 1..23: mol_type = other RNA
taacatctatgtatatgttcagc

SEQ ID NO: 1392 - RNA, 23 nt, synthetic construct
  source 1..23: mol_type = other RNA
ttccaactacaactcaacagggt

SEQ ID NO: 1393 - RNA, 23 nt, synthetic construct
  source 1..23: mol_type = other RNA
tcagacaaatccaactacaactc

SEQ ID NO: 1394 - RNA, 23 nt, synthetic construct
  source 1..23: mol_type = other RNA
tgcataaacagacaaatccaact

SEQ ID NO: 1395 - RNA, 23 nt, synthetic construct
  source 1..23: mol_type = other RNA
taatccaagcataaacagacaaa

SEQ ID NO: 1396 - RNA, 23 nt, synthetic construct
  source 1..23: mol_type = other RNA
tctctggtgaatccaagcataaa

SEQ ID NO: 1397 - RNA, 23 nt, synthetic construct
  source 1..23: mol_type = other RNA
tatagtcactctggtgaatccaa

SEQ ID NO: 1398 - RNA, 23 nt, synthetic construct
  source 1..23: mol_type = other RNA
tagcatttcaagatacatgcgtc

SEQ ID NO: 1399 - RNA, 23 nt, synthetic construct
  source 1..23: mol_type = other RNA
ttctttacaagcatttcaagata

SEQ ID NO: 1400 - RNA, 23 nt, synthetic construct
  source 1..23: mol_type = other RNA
tgggtgggttagaaacctcttta

SEQ ID NO: 1401 - RNA, 23 nt, synthetic construct
  source 1..23: mol_type = other RNA
taggaaagcctttcaaaacttgg

SEQ ID NO: 1402 - RNA, 23 nt, synthetic construct
  source 1..23: mol_type = other RNA
tcttgtcaagtcatccttcctca

SEQ ID NO: 1403 - RNA, 23 nt, synthetic construct
  source 1..23: mol_type = other RNA
tagtttctttaggcagcaatgtt

SEQ ID NO: 1404 - RNA, 23 nt, synthetic construct
  source 1..23: mol_type = other RNA
ttttaactgtacccaaaccagaa

SEQ ID NO: 1405 - RNA, 23 nt, synthetic construct
  source 1..23: mol_type = other RNA
tatcccttcaacttaggagaatt

SEQ ID NO: 1406 - RNA, 23 nt, synthetic construct
  source 1..23: mol_type = other RNA
tttctcagatcccttcaacttag

SEQ ID NO: 1407 - RNA, 23 nt, synthetic construct
  source 1..23: mol_type = other RNA
tacatttccttctccttctcaga

SEQ ID NO: 1408 - RNA, 23 nt, synthetic construct
  source 1..23: mol_type = other RNA
ttgatcaccctaaaccatgatct

SEQ ID NO: 1409 - RNA, 23 nt, synthetic construct
  source 1..23: mol_type = other RNA
ttttatctgccagcactgatcac

SEQ ID NO: 1410 - RNA, 23 nt, synthetic construct
  source 1..23: mol_type = other RNA
tccttttcaatttatctgccagc

SEQ ID NO: 1411 - RNA, 23 nt, synthetic construct
  source 1..23: mol_type = other RNA
tcagcgtgccttttcaatttatc

SEQ ID NO: 1412 - RNA, 23 nt, synthetic construct
  source 1..23: mol_type = other RNA
tagccagcgtgccttttcaattt

SEQ ID NO: 1413 - RNA, 23 nt, synthetic construct
  source 1..23: mol_type = other RNA
tggcatacagtatatcctatcta

SEQ ID NO: 1414 - RNA, 23 nt, synthetic construct
  source 1..23: mol_type = other RNA
tgaactattgataaagtgagtca

SEQ ID NO: 1415 - RNA, 23 nt, synthetic construct
  source 1..23: mol_type = other RNA
ttttaaatggaactattgataaa

SEQ ID NO: 1416 - RNA, 23 nt, synthetic construct
  source 1..23: mol_type = other RNA
taagtcaatttaaatggaactat

SEQ ID NO: 1417 - RNA, 23 nt, synthetic construct
  source 1..23: mol_type = other RNA
taccactgaagtcaatttaaatg

SEQ ID NO: 1418 - RNA, 23 nt, synthetic construct
  source 1..23: mol_type = other RNA
taatagcaaacaggatacagtct

SEQ ID NO: 1419 - RNA, 23 nt, synthetic construct
  source 1..23: mol_type = other RNA
taacaagcaatagcaaacaggat

SEQ ID NO: 1420 - RNA, 23 nt, synthetic construct
  source 1..23: mol_type = other RNA
tatagcacaacaagcaatagcaa

SEQ ID NO: 1421 - RNA, 23 nt, synthetic construct
  source 1..23: mol_type = other RNA
tatgttaactatcttacacattc

SEQ ID NO: 1422 - RNA, 23 nt, synthetic construct
  source 1..23: mol_type = other RNA
tctttgcccatgttaactatctt

SEQ ID NO: 1423 - RNA, 23 nt, synthetic construct
  source 1..23: mol_type = other RNA
ttctccctttgcccatgttaact

SEQ ID NO: 1424 - RNA, 23 nt, synthetic construct
  source 1..23: mol_type = other RNA
taaatcatgaaaagggttacgag

SEQ ID NO: 1425 - RNA, 23 nt, synthetic construct
  source 1..23: mol_type = other RNA
ttagcaaatgtggttgaaatcat

SEQ ID NO: 1426 - RNA, 23 nt, synthetic construct
  source 1..23: mol_type = other RNA
taccagatgtccatattcctacg

SEQ ID NO: 1427 - RNA, 23 nt, synthetic construct
  source 1..23: mol_type = other RNA
taaagcaaccagatgtccatatt

SEQ ID NO: 1428 - RNA, 23 nt, synthetic construct
  source 1..23: mol_type = other RNA
ttttacttggagaacaaagatga

SEQ ID NO: 1429 - RNA, 23 nt, synthetic construct
  source 1..23: mol_type = other RNA
tttttatgaagctgcaggtctgt

SEQ ID NO: 1430 - RNA, 23 nt, synthetic construct
  source 1..23: mol_type = other RNA
taatcagaagttttatgaagctg

SEQ ID NO: 1431 - RNA, 23 nt, synthetic construct
  source 1..23: mol_type = other RNA
tacccttttcaaagctgaagaga

SEQ ID NO: 1432 - RNA, 23 nt, synthetic construct
  source 1..23: mol_type = other RNA
tatagtcctgctcaacatggcaa

SEQ ID NO: 1433 - RNA, 23 nt, synthetic construct
  source 1..23: mol_type = other RNA
tcctcagaattaccgaagaaatc

SEQ ID NO: 1434 - RNA, 23 nt, synthetic construct
  source 1..23: mol_type = other RNA
ttaagctaagatgatttcatgtc

SEQ ID NO: 1435 - RNA, 23 nt, synthetic construct
  source 1..23: mol_type = other RNA
tcagaaagctaagctaagatgat

SEQ ID NO: 1436 - RNA, 23 nt, synthetic construct
  source 1..23: mol_type = other RNA
ttagacattcacagacagaaagc

SEQ ID NO: 1437 - RNA, 23 nt, synthetic construct
  source 1..23: mol_type = other RNA
tacacaatacactatatagacat

SEQ ID NO: 1438 - RNA, 23 nt, synthetic construct
  source 1..23: mol_type = other RNA
taatcatttgttaaaacacacaa

SEQ ID NO: 1439 - RNA, 23 nt, synthetic construct
  source 1..23: mol_type = other RNA
tcaacagtcagtgtaaatcattt

SEQ ID NO: 1440 - RNA, 23 nt, synthetic construct
  source 1..23: mol_type = other RNA
tttttacagcaacagtcagtgta

SEQ ID NO: 1441 - RNA, 23 nt, synthetic construct
  source 1..23: mol_type = other RNA
taaattcacttttacagcaacag

SEQ ID NO: 1442 - RNA, 23 nt, synthetic construct
  source 1..23: mol_type = other RNA
ttaataactttatttccaaattc

SEQ ID NO: 1443 - RNA, 23 nt, synthetic construct
  source 1..23: mol_type = other RNA
tatcagagtaataactttatttc

SEQ ID NO: 1444 - RNA, 21 nt, synthetic construct
  source 1..21: mol_type = other RNA
tctgtcgactatcaggtgaaa

SEQ ID NO: 1445 - RNA, 21 nt, synthetic construct
  source 1..21: mol_type = other RNA
ctatcaggtgaactttgaaca

SEQ ID NO: 1446 - RNA, 21 nt, synthetic construct
  source 1..21: mol_type = other RNA
atcaggtgaactttgaaccaa

SEQ ID NO: 1447 - RNA, 21 nt, synthetic construct
  source 1..21: mol_type = other RNA
gtgaactttgaaccaggatga

SEQ ID NO: 1448 - RNA, 21 nt, synthetic construct
  source 1..21: mol_type = other RNA
gaaccaggatggctgagccca

SEQ ID NO: 1449 - RNA, 21 nt, synthetic construct
  source 1..21: mol_type = other RNA
accaggatggctgagccccga

SEQ ID NO: 1450 - RNA, 21 nt, synthetic construct
  source 1..21: mol_type = other RNA
ggctgagccccgccaggagta

SEQ ID NO: 1451 - RNA, 21 nt, synthetic construct
  source 1..21: mol_type = other RNA
gccccgccaggagttcgaaga

SEQ ID NO: 1452 - RNA, 21 nt, synthetic construct
  source 1..21: mol_type = other RNA
cgccaggagttcgaagtgata

SEQ ID NO: 1453 - RNA, 21 nt, synthetic construct
  source 1..21: mol_type = other RNA
aggagttcgaagtgatggaaa

SEQ ID NO: 1454 - RNA, 21 nt, synthetic construct
  source 1..21: mol_type = other RNA
ttcgaagtgatggaagatcaa

SEQ ID NO: 1455 - RNA, 21 nt, synthetic construct
  source 1..21: mol_type = other RNA
tggaagatcacgctgggacga

SEQ ID NO: 1456 - RNA, 21 nt, synthetic construct
  source 1..21: mol_type = other RNA
gaagatcacgctgggacgtaa

SEQ ID NO: 1457 - RNA, 21 nt, synthetic construct
  source 1..21: mol_type = other RNA
agatcacgctgggacgtacga

SEQ ID NO: 1458 - RNA, 21 nt, synthetic construct
  source 1..21: mol_type = other RNA
gatcacgctgggacgtacgga

SEQ ID NO: 1459 - RNA, 21 nt, synthetic construct
  source 1..21: mol_type = other RNA
ctgggacgtacgggttgggga

SEQ ID NO: 1460 - RNA, 21 nt, synthetic construct
  source 1..21: mol_type = other RNA
ggggacaggaaagatcaggga

SEQ ID NO: 1461 - RNA, 21 nt, synthetic construct
  source 1..21: mol_type = other RNA
caggggggctacaccatgcaa

SEQ ID NO: 1462 - RNA, 21 nt, synthetic construct
  source 1..21: mol_type = other RNA
atgcaccaagaccaagaggga

SEQ ID NO: 1463 - RNA, 21 nt, synthetic construct
  source 1..21: mol_type = other RNA
gaccaagagggtgacacggaa

SEQ ID NO: 1464 - RNA, 21 nt, synthetic construct
  source 1..21: mol_type = other RNA
ccaagagggtgacacggacga

SEQ ID NO: 1465 - RNA, 21 nt, synthetic construct
  source 1..21: mol_type = other RNA
agggtgacacggacgctggca

SEQ ID NO: 1466 - RNA, 21 nt, synthetic construct
  source 1..21: mol_type = other RNA
ctggcctgaaagaatctccca

SEQ ID NO: 1467 - RNA, 21 nt, synthetic construct
  source 1..21: mol_type = other RNA
aagaatctcccctgcagacca

SEQ ID NO: 1468 - RNA, 21 nt, synthetic construct
  source 1..21: mol_type = other RNA
tgcagacccccactgaggaca

SEQ ID NO: 1469 - RNA, 21 nt, synthetic construct
  source 1..21: mol_type = other RNA
acggatctgaggaaccgggca

SEQ ID NO: 1470 - RNA, 21 nt, synthetic construct
  source 1..21: mol_type = other RNA
ccgggctctgaaacctctgaa

SEQ ID NO: 1471 - RNA, 21 nt, synthetic construct
  source 1..21: mol_type = other RNA
gacacccccagcctggaagaa

SEQ ID NO: 1472 - RNA, 21 nt, synthetic construct
  source 1..21: mol_type = other RNA
gtcacgtgacccaagaggaga

SEQ ID NO: 1473 - RNA, 21 nt, synthetic construct
  source 1..21: mol_type = other RNA
caagaggagttgagagttcca

SEQ ID NO: 1474 - RNA, 21 nt, synthetic construct
  source 1..21: mol_type = other RNA
aaggcgcctgaaaggccccta

SEQ ID NO: 1475 - RNA, 21 nt, synthetic construct
  source 1..21: mol_type = other RNA
cctggccaatgagattagcga

SEQ ID NO: 1476 - RNA, 21 nt, synthetic construct
  source 1..21: mol_type = other RNA
ggagaggcctctggggtctca

SEQ ID NO: 1477 - RNA, 21 nt, synthetic construct
  source 1..21: mol_type = other RNA
gagaaagagccagaagctcca

SEQ ID NO: 1478 - RNA, 21 nt, synthetic construct
  source 1..21: mol_type = other RNA
cgtcccgtttgcccagcgcca

SEQ ID NO: 1479 - RNA, 21 nt, synthetic construct
  source 1..21: mol_type = other RNA
ccctggagtggggacaaaaaa

SEQ ID NO: 1480 - RNA, 21 nt, synthetic construct
  source 1..21: mol_type = other RNA
ccgagaagggtccggccttta

SEQ ID NO: 1481 - RNA, 21 nt, synthetic construct
  source 1..21: mol_type = other RNA
cgtatctccacacagagccta

SEQ ID NO: 1482 - RNA, 21 nt, synthetic construct
  source 1..21: mol_type = other RNA
agcctgaaagtggtaaggtga

SEQ ID NO: 1483 - RNA, 21 nt, synthetic construct
  source 1..21: mol_type = other RNA
gtaaggtggtccaggaaggca

SEQ ID NO: 1484 - RNA, 21 nt, synthetic construct
  source 1..21: mol_type = other RNA
tccgagagccaggccccccaa

SEQ ID NO: 1485 - RNA, 21 nt, synthetic construct
  source 1..21: mol_type = other RNA
gaggccacacgccaaccttca

SEQ ID NO: 1486 - RNA, 21 nt, synthetic construct
  source 1..21: mol_type = other RNA
ctgaggacacagagggcggca

SEQ ID NO: 1487 - RNA, 21 nt, synthetic construct
  source 1..21: mol_type = other RNA
tcaagcaccagcttctaggaa

SEQ ID NO: 1488 - RNA, 21 nt, synthetic construct
  source 1..21: mol_type = other RNA
cttctaggagacctgcaccaa

SEQ ID NO: 1489 - RNA, 21 nt, synthetic construct
  source 1..21: mol_type = other RNA
tgaagggggcagggggcaaaa

SEQ ID NO: 1490 - RNA, 21 nt, synthetic construct
  source 1..21: mol_type = other RNA
aggaggtggatgaagaccgca

SEQ ID NO: 1491 - RNA, 21 nt, synthetic construct
  source 1..21: mol_type = other RNA
gggcggcctccccagacagca

SEQ ID NO: 1492 - RNA, 21 nt, synthetic construct
  source 1..21: mol_type = other RNA
tccaaagtttccacagagata

SEQ ID NO: 1493 - RNA, 21 nt, synthetic construct
  source 1..21: mol_type = other RNA
tggagttcacgtttcacgtga

SEQ ID NO: 1494 - RNA, 21 nt, synthetic construct
  source 1..21: mol_type = other RNA
acgtggaaatcacacccaaca

SEQ ID NO: 1495 - RNA, 21 nt, synthetic construct
  source 1..21: mol_type = other RNA
aaggagcaggcgcactcggaa

SEQ ID NO: 1496 - RNA, 21 nt, synthetic construct
  source 1..21: mol_type = other RNA
ggagcatttgggaagggctga

SEQ ID NO: 1497 - RNA, 21 nt, synthetic construct
  source 1..21: mol_type = other RNA
gggagaggacacaaaagagga

SEQ ID NO: 1498 - RNA, 21 nt, synthetic construct
  source 1..21: mol_type = other RNA
agaggctgaccttccagagca

SEQ ID NO: 1499 - RNA, 21 nt, synthetic construct
  source 1..21: mol_type = other RNA
agagccctctgaaaagcagca

SEQ ID NO: 1500 - RNA, 21 nt, synthetic construct
  source 1..21: mol_type = other RNA
tgaaaagcagcctgctgctga

SEQ ID NO: 1501 - RNA, 21 nt, synthetic construct
  source 1..21: mol_type = other RNA
tccgcgggggaagcccgtcaa

SEQ ID NO: 1502 - RNA, 21 nt, synthetic construct
  source 1..21: mol_type = other RNA
ctggaagcgatgacaaaaaaa

SEQ ID NO: 1503 - RNA, 21 nt, synthetic construct
  source 1..21: mol_type = other RNA
aaaaagccaagacatccacaa

SEQ ID NO: 1504 - RNA, 21 nt, synthetic construct
  source 1..21: mol_type = other RNA
ctaaaaccttgaaaaatagga

SEQ ID NO: 1505 - RNA, 21 nt, synthetic construct
  source 1..21: mol_type = other RNA
aaataggccttgccttagcca

SEQ ID NO: 1506 - RNA, 21 nt, synthetic construct
  source 1..21: mol_type = other RNA
ctcctggtagctcagacccta

SEQ ID NO: 1507 - RNA, 21 nt, synthetic construct
  source 1..21: mol_type = other RNA
tcagaccctctgatccaacca

SEQ ID NO: 1508 - RNA, 21 nt, synthetic construct
  source 1..21: mol_type = other RNA
ccagccctgctgtgtgcccaa

SEQ ID NO: 1509 - RNA, 21 nt, synthetic construct
  source 1..21: mol_type = other RNA
ccttcctctcctaaatacgta

SEQ ID NO: 1510 - RNA, 21 nt, synthetic construct
  source 1..21: mol_type = other RNA
tacgtctcttctgtcacttca

SEQ ID NO: 1511 - RNA, 21 nt, synthetic construct
  source 1..21: mol_type = other RNA
acttcccgaactggcagttca

SEQ ID NO: 1512 - RNA, 21 nt, synthetic construct
  source 1..21: mol_type = other RNA
agttctggagcaaaggagata

SEQ ID NO: 1513 - RNA, 21 nt, synthetic construct
  source 1..21: mol_type = other RNA
gagatgaaactcaagggggca

SEQ ID NO: 1514 - RNA, 21 nt, synthetic construct
  source 1..21: mol_type = other RNA
ggggctgatggtaaaacgaaa

SEQ ID NO: 1515 - RNA, 21 nt, synthetic construct
  source 1..21: mol_type = other RNA
gatggtaaaacgaagatcgca

SEQ ID NO: 1516 - RNA, 21 nt, synthetic construct
  source 1..21: mol_type = other RNA
tggtaaaacgaagatcgccaa

SEQ ID NO: 1517 - RNA, 21 nt, synthetic construct
  source 1..21: mol_type = other RNA
taaaacgaagatcgccacaca

SEQ ID NO: 1518 - RNA, 21 nt, synthetic construct
  source 1..21: mol_type = other RNA
gcccctccaggccagaaggga

SEQ ID NO: 1519 - RNA, 21 nt, synthetic construct
  source 1..21: mol_type = other RNA
accaggattccagcaaaaaca

SEQ ID NO: 1520 - RNA, 21 nt, synthetic construct
  source 1..21: mol_type = other RNA
cagcaaaaaccccgcccgcta

SEQ ID NO: 1521 - RNA, 21 nt, synthetic construct
  source 1..21: mol_type = other RNA
gcccgctccaaagacaccaca

SEQ ID NO: 1522 - RNA, 21 nt, synthetic construct
  source 1..21: mol_type = other RNA
accacccagctctggtgaaca

SEQ ID NO: 1523 - RNA, 21 nt, synthetic construct
  source 1..21: mol_type = other RNA
aaatcaggggatcgcagcgga

SEQ ID NO: 1524 - RNA, 21 nt, synthetic construct
  source 1..21: mol_type = other RNA
gcagccgctcccgcaccccga

SEQ ID NO: 1525 - RNA, 21 nt, synthetic construct
  source 1..21: mol_type = other RNA
tggcagtggtccgtactccaa

SEQ ID NO: 1526 - RNA, 21 nt, synthetic construct
  source 1..21: mol_type = other RNA
ccgtactccacccaagtcgca

SEQ ID NO: 1527 - RNA, 21 nt, synthetic construct
  source 1..21: mol_type = other RNA
aagagccgcctgcagacagca

SEQ ID NO: 1528 - RNA, 21 nt, synthetic construct
  source 1..21: mol_type = other RNA
ccagacctgaagaatgtcaaa

SEQ ID NO: 1529 - RNA, 21 nt, synthetic construct
  source 1..21: mol_type = other RNA
gtcaagtccaagatcggctca

SEQ ID NO: 1530 - RNA, 21 nt, synthetic construct
  source 1..21: mol_type = other RNA
ggctccactgagaacctgaaa

SEQ ID NO: 1531 - RNA, 21 nt, synthetic construct
  source 1..21: mol_type = other RNA
aaggtgcagataattaataaa

SEQ ID NO: 1532 - RNA, 21 nt, synthetic construct
  source 1..21: mol_type = other RNA
aataagaagctggatcttaga

SEQ ID NO: 1533 - RNA, 21 nt, synthetic construct
  source 1..21: mol_type = other RNA
cttagcaacgtccagtccaaa

SEQ ID NO: 1534 - RNA, 21 nt, synthetic construct
  source 1..21: mol_type = other RNA
tccaagtgtggctcaaaggaa

SEQ ID NO: 1535 - RNA, 21 nt, synthetic construct
  source 1..21: mol_type = other RNA
aaggataatatcaaacacgta

SEQ ID NO: 1536 - RNA, 21 nt, synthetic construct
  source 1..21: mol_type = other RNA
cgtcccgggaggcggcagtga

SEQ ID NO: 1537 - RNA, 21 nt, synthetic construct
  source 1..21: mol_type = other RNA
tacaaaccagttgacctgaga

SEQ ID NO: 1538 - RNA, 21 nt, synthetic construct
  source 1..21: mol_type = other RNA
ctgagcaaggtgacctccaaa

SEQ ID NO: 1539 - RNA, 21 nt, synthetic construct
  source 1..21: mol_type = other RNA
tccaagtgtggctcattagga

SEQ ID NO: 1540 - RNA, 21 nt, synthetic construct
  source 1..21: mol_type = other RNA
atcataaaccaggaggtggca

SEQ ID NO: 1541 - RNA, 21 nt, synthetic construct
  source 1..21: mol_type = other RNA
aagtaaaatctgagaagctta

SEQ ID NO: 1542 - RNA, 21 nt, synthetic construct
  source 1..21: mol_type = other RNA
agcttgacttcaaggacagaa

SEQ ID NO: 1543 - RNA, 21 nt, synthetic construct
  source 1..21: mol_type = other RNA
acagagtccagtcgaagatta

SEQ ID NO: 1544 - RNA, 21 nt, synthetic construct
  source 1..21: mol_type = other RNA
tggacaatatcacccacgtca

SEQ ID NO: 1545 - RNA, 21 nt, synthetic construct
  source 1..21: mol_type = other RNA
attgaaacccacaagctgaca

SEQ ID NO: 1546 - RNA, 21 nt, synthetic construct
  source 1..21: mol_type = other RNA
aagctgaccttccgcgagaaa

SEQ ID NO: 1547 - RNA, 21 nt, synthetic construct
  source 1..21: mol_type = other RNA
cagaccacggggcggagatca

SEQ ID NO: 1548 - RNA, 21 nt, synthetic construct
  source 1..21: mol_type = other RNA
cgtgtacaagtcgccagtgga

SEQ ID NO: 1549 - RNA, 21 nt, synthetic construct
  source 1..21: mol_type = other RNA
cggcatctcagcaatgtctca

SEQ ID NO: 1550 - RNA, 21 nt, synthetic construct
  source 1..21: mol_type = other RNA
tccaccggcagcatcgacata

SEQ ID NO: 1551 - RNA, 21 nt, synthetic construct
  source 1..21: mol_type = other RNA
catcgacatggtagactcgca

SEQ ID NO: 1552 - RNA, 21 nt, synthetic construct
  source 1..21: mol_type = other RNA
cgccccagctcgccacgctaa

SEQ ID NO: 1553 - RNA, 21 nt, synthetic construct
  source 1..21: mol_type = other RNA
acgctagctgacgaggtgtca

SEQ ID NO: 1554 - RNA, 21 nt, synthetic construct
  source 1..21: mol_type = other RNA
ccaagcagggtttgtgatcaa

SEQ ID NO: 1555 - RNA, 21 nt, synthetic construct
  source 1..21: mol_type = other RNA
tgatcaggcccctggggcgga

SEQ ID NO: 1556 - RNA, 21 nt, synthetic construct
  source 1..21: mol_type = other RNA
cggtcaataattgtggagaga

SEQ ID NO: 1557 - RNA, 21 nt, synthetic construct
  source 1..21: mol_type = other RNA
gagaggagagaatgagagaga

SEQ ID NO: 1558 - RNA, 21 nt, synthetic construct
  source 1..21: mol_type = other RNA
aaaaaagaataatgacccgga

SEQ ID NO: 1559 - RNA, 21 nt, synthetic construct
  source 1..21: mol_type = other RNA
cccgccctctgcccccagcta

SEQ ID NO: 1560 - RNA, 21 nt, synthetic construct
  source 1..21: mol_type = other RNA
tcgcagttcggttaattggta

SEQ ID NO: 1561 - RNA, 21 nt, synthetic construct
  source 1..21: mol_type = other RNA
ttggttaatcacttaacctga

SEQ ID NO: 1562 - RNA, 21 nt, synthetic construct
  source 1..21: mol_type = other RNA
acctgcttttgtcactcggca

SEQ ID NO: 1563 - RNA, 21 nt, synthetic construct
  source 1..21: mol_type = other RNA
tcggctttggctcgggactta

SEQ ID NO: 1564 - RNA, 21 nt, synthetic construct
  source 1..21: mol_type = other RNA
gacttcaaaatcagtgatgga

SEQ ID NO: 1565 - RNA, 21 nt, synthetic construct
  source 1..21: mol_type = other RNA
gatgggagtaagagcaaatta

SEQ ID NO: 1566 - RNA, 21 nt, synthetic construct
  source 1..21: mol_type = other RNA
aaatttcatctttccaaatta

SEQ ID NO: 1567 - RNA, 21 nt, synthetic construct
  source 1..21: mol_type = other RNA
tgggctagtaataaaatatta

SEQ ID NO: 1568 - RNA, 21 nt, synthetic construct
  source 1..21: mol_type = other RNA
aaatatttaaaaaaaaacata

SEQ ID NO: 1569 - RNA, 21 nt, synthetic construct
  source 1..21: mol_type = other RNA
attcaaaaacatggccacata

SEQ ID NO: 1570 - RNA, 21 nt, synthetic construct
  source 1..21: mol_type = other RNA
cacatccaacatttcctcaga

SEQ ID NO: 1571 - RNA, 21 nt, synthetic construct
  source 1..21: mol_type = other RNA
ctcaggcaattccttttgata

SEQ ID NO: 1572 - RNA, 21 nt, synthetic construct
  source 1..21: mol_type = other RNA
ttgattcttttttcttcccca

SEQ ID NO: 1573 - RNA, 21 nt, synthetic construct
  source 1..21: mol_type = other RNA
tccccctccatgtagaagaga

SEQ ID NO: 1574 - RNA, 21 nt, synthetic construct
  source 1..21: mol_type = other RNA
aagagggagaaggagaggcta

SEQ ID NO: 1575 - RNA, 21 nt, synthetic construct
  source 1..21: mol_type = other RNA
aggctctgaaagctgcttcta

SEQ ID NO: 1576 - RNA, 21 nt, synthetic construct
  source 1..21: mol_type = other RNA
tgcttctgggggatttcaaga

SEQ ID NO: 1577 - RNA, 21 nt, synthetic construct
  source 1..21: mol_type = other RNA
ggatttcaagggactggggga

SEQ ID NO: 1578 - RNA, 21 nt, synthetic construct
  source 1..21: mol_type = other RNA
acctctggccctgttgtggga

SEQ ID NO: 1579 - RNA, 21 nt, synthetic construct
  source 1..21: mol_type = other RNA
aaaggatttgaaacttggtga

SEQ ID NO: 1580 - RNA, 21 nt, synthetic construct
  source 1..21: mol_type = other RNA
acttggtgtgttcgtggagca

SEQ ID NO: 1581 - RNA, 21 nt, synthetic construct
  source 1..21: mol_type = other RNA
tcgtggagccacaggcagaca

SEQ ID NO: 1582 - RNA, 21 nt, synthetic construct
  source 1..21: mol_type = other RNA
cagacgatgtcaaccttgtga

SEQ ID NO: 1583 - RNA, 21 nt, synthetic construct
  source 1..21: mol_type = other RNA
aagaagtgggagtgggagaga

SEQ ID NO: 1584 - RNA, 21 nt, synthetic construct
  source 1..21: mol_type = other RNA
gtgggagaggaagccacgtga

SEQ ID NO: 1585 - RNA, 21 nt, synthetic construct
  source 1..21: mol_type = other RNA
cgtgctggagagtagacatca

SEQ ID NO: 1586 - RNA, 21 nt, synthetic construct
  source 1..21: mol_type = other RNA
gagtagacatccccctcctta

SEQ ID NO: 1587 - RNA, 21 nt, synthetic construct
  source 1..21: mol_type = other RNA
ctgtccttggtggccggggga

SEQ ID NO: 1588 - RNA, 21 nt, synthetic construct
  source 1..21: mol_type = other RNA
tggcaggagggtggcacttca

SEQ ID NO: 1589 - RNA, 21 nt, synthetic construct
  source 1..21: mol_type = other RNA
agaaaagactgaccttgatga

SEQ ID NO: 1590 - RNA, 21 nt, synthetic construct
  source 1..21: mol_type = other RNA
ttgatgtcttgagagcgctga

SEQ ID NO: 1591 - RNA, 21 nt, synthetic construct
  source 1..21: mol_type = other RNA
ctgctccacagaaaccctgta

SEQ ID NO: 1592 - RNA, 21 nt, synthetic construct
  source 1..21: mol_type = other RNA
tctgaaggttggaactgctga

SEQ ID NO: 1593 - RNA, 21 nt, synthetic construct
  source 1..21: mol_type = other RNA
tgctgccatgattttggccaa

SEQ ID NO: 1594 - RNA, 21 nt, synthetic construct
  source 1..21: mol_type = other RNA
taaccagttctctttgtaaga

SEQ ID NO: 1595 - RNA, 21 nt, synthetic construct
  source 1..21: mol_type = other RNA
gtaaggacttgtgcctcttga

SEQ ID NO: 1596 - RNA, 21 nt, synthetic construct
  source 1..21: mol_type = other RNA
gcctcttgggagacgtccaca

SEQ ID NO: 1597 - RNA, 21 nt, synthetic construct
  source 1..21: mol_type = other RNA
cgtccacccgtttccaagcca

SEQ ID NO: 1598 - RNA, 21 nt, synthetic construct
  source 1..21: mol_type = other RNA
gtttccaagcctgggccacta

SEQ ID NO: 1599 - RNA, 21 nt, synthetic construct
  source 1..21: mol_type = other RNA
gcctgggccactggcatctca

SEQ ID NO: 1600 - RNA, 21 nt, synthetic construct
  source 1..21: mol_type = other RNA
gcatctctggagtgtgtggga

SEQ ID NO: 1601 - RNA, 21 nt, synthetic construct
  source 1..21: mol_type = other RNA
ctgtccttcccacggccacta

SEQ ID NO: 1602 - RNA, 21 nt, synthetic construct
  source 1..21: mol_type = other RNA
cctatacccctcatcacacga

SEQ ID NO: 1603 - RNA, 21 nt, synthetic construct
  source 1..21: mol_type = other RNA
acacgtcacaatgtcccgaaa

SEQ ID NO: 1604 - RNA, 21 nt, synthetic construct
  source 1..21: mol_type = other RNA
tcagtaatgaccctggttgga

SEQ ID NO: 1605 - RNA, 21 nt, synthetic construct
  source 1..21: mol_type = other RNA
tacctactccatactgaggga

SEQ ID NO: 1606 - RNA, 21 nt, synthetic construct
  source 1..21: mol_type = other RNA
gagggtgaaattaagggaaga

SEQ ID NO: 1607 - RNA, 21 nt, synthetic construct
  source 1..21: mol_type = other RNA
aagagtgggaccccagcctca

SEQ ID NO: 1608 - RNA, 21 nt, synthetic construct
  source 1..21: mol_type = other RNA
ccactcatccaactgggacca

SEQ ID NO: 1609 - RNA, 21 nt, synthetic construct
  source 1..21: mol_type = other RNA
tgggaccctcaccacgaatca

SEQ ID NO: 1610 - RNA, 21 nt, synthetic construct
  source 1..21: mol_type = other RNA
gaatctcatgatctgattcga

SEQ ID NO: 1611 - RNA, 21 nt, synthetic construct
  source 1..21: mol_type = other RNA
ctgattcggttccctgtctca

SEQ ID NO: 1612 - RNA, 21 nt, synthetic construct
  source 1..21: mol_type = other RNA
cctgtctcctcctcccgtcaa

SEQ ID NO: 1613 - RNA, 21 nt, synthetic construct
  source 1..21: mol_type = other RNA
cccgtcacagatgtgagccaa

SEQ ID NO: 1614 - RNA, 21 nt, synthetic construct
  source 1..21: mol_type = other RNA
gccagggcactgctcagctga

SEQ ID NO: 1615 - RNA, 21 nt, synthetic construct
  source 1..21: mol_type = other RNA
ctgtgaccctaggtgtttcta

SEQ ID NO: 1616 - RNA, 21 nt, synthetic construct
  source 1..21: mol_type = other RNA
catggagagagccctttccca

SEQ ID NO: 1617 - RNA, 21 nt, synthetic construct
  source 1..21: mol_type = other RNA
ggtgtcttggttgtcagtgga

SEQ ID NO: 1618 - RNA, 21 nt, synthetic construct
  source 1..21: mol_type = other RNA
tgtcagtggtggcaccaggaa

SEQ ID NO: 1619 - RNA, 21 nt, synthetic construct
  source 1..21: mol_type = other RNA
acccagggcaggcccacagta

SEQ ID NO: 1620 - RNA, 21 nt, synthetic construct
  source 1..21: mol_type = other RNA
cagacagcccagcccgctgca

SEQ ID NO: 1621 - RNA, 21 nt, synthetic construct
  source 1..21: mol_type = other RNA
gctccacatgcatagtatcaa

SEQ ID NO: 1622 - RNA, 21 nt, synthetic construct
  source 1..21: mol_type = other RNA
agtatcagccctccacaccca

SEQ ID NO: 1623 - RNA, 21 nt, synthetic construct
  source 1..21: mol_type = other RNA
aaaggggaacacaccccctta

SEQ ID NO: 1624 - RNA, 21 nt, synthetic construct
  source 1..21: mol_type = other RNA
cccttggaaatggttctttta

SEQ ID NO: 1625 - RNA, 21 nt, synthetic construct
  source 1..21: mol_type = other RNA
ttcttttcccccagtcccaga

SEQ ID NO: 1626 - RNA, 21 nt, synthetic construct
  source 1..21: mol_type = other RNA
agtcccagctggaagccatga

SEQ ID NO: 1627 - RNA, 21 nt, synthetic construct
  source 1..21: mol_type = other RNA
ccatgctgtctgttctgctga

SEQ ID NO: 1628 - RNA, 21 nt, synthetic construct
  source 1..21: mol_type = other RNA
tgctggagcagctgaacataa

SEQ ID NO: 1629 - RNA, 21 nt, synthetic construct
  source 1..21: mol_type = other RNA
acatatacatagatgttgcca

SEQ ID NO: 1630 - RNA, 21 nt, synthetic construct
  source 1..21: mol_type = other RNA
ccctgccctccccatctgcaa

SEQ ID NO: 1631 - RNA, 21 nt, synthetic construct
  source 1..21: mol_type = other RNA
gcaccctgttgagttgtagta

SEQ ID NO: 1632 - RNA, 21 nt, synthetic construct
  source 1..21: mol_type = other RNA
tcaccagagtgactatgataa

SEQ ID NO: 1633 - RNA, 21 nt, synthetic construct
  source 1..21: mol_type = other RNA
ttgtaaagaggtttctaacca

SEQ ID NO: 1634 - RNA, 21 nt, synthetic construct
  source 1..21: mol_type = other RNA
ttctaacccaccctcacgaga

SEQ ID NO: 1635 - RNA, 21 nt, synthetic construct
  source 1..21: mol_type = other RNA
tgtctctcacccccacactga

SEQ ID NO: 1636 - RNA, 21 nt, synthetic construct
  source 1..21: mol_type = other RNA
ctgggactcgtgtggcctgta

SEQ ID NO: 1637 - RNA, 21 nt, synthetic construct
  source 1..21: mol_type = other RNA
tgtgtggtgccaccctgctga

SEQ ID NO: 1638 - RNA, 21 nt, synthetic construct
  source 1..21: mol_type = other RNA
ctcccaagttttgaaaggcta

SEQ ID NO: 1639 - RNA, 21 nt, synthetic construct
  source 1..21: mol_type = other RNA
aaggctttcctcagcacctga

SEQ ID NO: 1640 - RNA, 21 nt, synthetic construct
  source 1..21: mol_type = other RNA
cacctgggacccaacagagaa

SEQ ID NO: 1641 - RNA, 21 nt, synthetic construct
  source 1..21: mol_type = other RNA
agagaccagcttctagcagca

SEQ ID NO: 1642 - RNA, 21 nt, synthetic construct
  source 1..21: mol_type = other RNA
gcagctaaggaggccgttcaa

SEQ ID NO: 1643 - RNA, 21 nt, synthetic construct
  source 1..21: mol_type = other RNA
cgttcagctgtgacgaaggca

SEQ ID NO: 1644 - RNA, 21 nt, synthetic construct
  source 1..21: mol_type = other RNA
gaaggcctgaagcacaggata

SEQ ID NO: 1645 - RNA, 21 nt, synthetic construct
  source 1..21: mol_type = other RNA
aggattaggactgaagcgata

SEQ ID NO: 1646 - RNA, 21 nt, synthetic construct
  source 1..21: mol_type = other RNA
tccccttggggctccctgtga

SEQ ID NO: 1647 - RNA, 21 nt, synthetic construct
  source 1..21: mol_type = other RNA
cagggcacagactaggtctta

SEQ ID NO: 1648 - RNA, 21 nt, synthetic construct
  source 1..21: mol_type = other RNA
ctaggtcttgtggctggtcta

SEQ ID NO: 1649 - RNA, 21 nt, synthetic construct
  source 1..21: mol_type = other RNA
ctggcttgcggcgcgaggata

SEQ ID NO: 1650 - RNA, 21 nt, synthetic construct
  source 1..21: mol_type = other RNA
gttctctctggtcatagccca

SEQ ID NO: 1651 - RNA, 21 nt, synthetic construct
  source 1..21: mol_type = other RNA
agcccgaagtctcatggcaga

SEQ ID NO: 1652 - RNA, 21 nt, synthetic construct
  source 1..21: mol_type = other RNA
ggcttacaactcctgcatcaa

SEQ ID NO: 1653 - RNA, 21 nt, synthetic construct
  source 1..21: mol_type = other RNA
catcacaagaaaaaggaagca

SEQ ID NO: 1654 - RNA, 21 nt, synthetic construct
  source 1..21: mol_type = other RNA
aaaaggaagccactgccagca

SEQ ID NO: 1655 - RNA, 21 nt, synthetic construct
  source 1..21: mol_type = other RNA
gctggggggatctgcagctca

SEQ ID NO: 1656 - RNA, 21 nt, synthetic construct
  source 1..21: mol_type = other RNA
gctcccagaagctccgtgaga

SEQ ID NO: 1657 - RNA, 21 nt, synthetic construct
  source 1..21: mol_type = other RNA
tgagcctcagccacccctcaa

SEQ ID NO: 1658 - RNA, 21 nt, synthetic construct
  source 1..21: mol_type = other RNA
agactgggttcctctccaaga

SEQ ID NO: 1659 - RNA, 21 nt, synthetic construct
  source 1..21: mol_type = other RNA
agggattgggatgaattgcca

SEQ ID NO: 1660 - RNA, 21 nt, synthetic construct
  source 1..21: mol_type = other RNA
ttgcctgtcctggatctgcta

SEQ ID NO: 1661 - RNA, 21 nt, synthetic construct
  source 1..21: mol_type = other RNA
gaggcccaagctgcctgccta

SEQ ID NO: 1662 - RNA, 21 nt, synthetic construct
  source 1..21: mol_type = other RNA
acttgacaagtcaggagacaa

SEQ ID NO: 1663 - RNA, 21 nt, synthetic construct
  source 1..21: mol_type = other RNA
agacactgttcccaaagccta

SEQ ID NO: 1664 - RNA, 21 nt, synthetic construct
  source 1..21: mol_type = other RNA
caaagccttgaccagagcaca

SEQ ID NO: 1665 - RNA, 21 nt, synthetic construct
  source 1..21: mol_type = other RNA
agagcacctcagcccgctgaa

SEQ ID NO: 1666 - RNA, 21 nt, synthetic construct
  source 1..21: mol_type = other RNA
tgaccttgcacaaactccata

SEQ ID NO: 1667 - RNA, 21 nt, synthetic construct
  source 1..21: mol_type = other RNA
gagaaaagggaagccgcctta

SEQ ID NO: 1668 - RNA, 21 nt, synthetic construct
  source 1..21: mol_type = other RNA
gcctttgcaaaacattgctga

SEQ ID NO: 1669 - RNA, 21 nt, synthetic construct
  source 1..21: mol_type = other RNA
tgctgcctaaagaaactcaga

SEQ ID NO: 1670 - RNA, 21 nt, synthetic construct
  source 1..21: mol_type = other RNA
tcaggcccaattctgccacta

SEQ ID NO: 1671 - RNA, 21 nt, synthetic construct
  source 1..21: mol_type = other RNA
ccacttctggtttgggtacaa

SEQ ID NO: 1672 - RNA, 21 nt, synthetic construct
  source 1..21: mol_type = other RNA
gtacagttaaaggcaacccta

SEQ ID NO: 1673 - RNA, 21 nt, synthetic construct
  source 1..21: mol_type = other RNA
tggcagtagaaatccagggca

SEQ ID NO: 1674 - RNA, 21 nt, synthetic construct
  source 1..21: mol_type = other RNA
ctcccctggggctggcagcta

SEQ ID NO: 1675 - RNA, 21 nt, synthetic construct
  source 1..21: mol_type = other RNA
cgtgtgcagctagagctttaa

SEQ ID NO: 1676 - RNA, 21 nt, synthetic construct
  source 1..21: mol_type = other RNA
ctttacctgaaaggaagtcta

SEQ ID NO: 1677 - RNA, 21 nt, synthetic construct
  source 1..21: mol_type = other RNA
ggaagtctctgggcccagaaa

SEQ ID NO: 1678 - RNA, 21 nt, synthetic construct
  source 1..21: mol_type = other RNA
ggcccagaactctccaccaaa

SEQ ID NO: 1679 - RNA, 21 nt, synthetic construct
  source 1..21: mol_type = other RNA
actctccaccaagagcctcca

SEQ ID NO: 1680 - RNA, 21 nt, synthetic construct
  source 1..21: mol_type = other RNA
atctgagaaggagaaggaaaa

SEQ ID NO: 1681 - RNA, 21 nt, synthetic construct
  source 1..21: mol_type = other RNA
ggaaatgtggggtagatttga

SEQ ID NO: 1682 - RNA, 21 nt, synthetic construct
  source 1..21: mol_type = other RNA
gagatatgcccccctcattaa

SEQ ID NO: 1683 - RNA, 21 nt, synthetic construct
  source 1..21: mol_type = other RNA
cattactgccaacagtttcga

SEQ ID NO: 1684 - RNA, 21 nt, synthetic construct
  source 1..21: mol_type = other RNA
tttcggctgcatttcttcaca

SEQ ID NO: 1685 - RNA, 21 nt, synthetic construct
  source 1..21: mol_type = other RNA
ttcacgcacctcggttcctca

SEQ ID NO: 1686 - RNA, 21 nt, synthetic construct
  source 1..21: mol_type = other RNA
tcctcttcctgaagttcttga

SEQ ID NO: 1687 - RNA, 21 nt, synthetic construct
  source 1..21: mol_type = other RNA
ttcttgtgccctgctcttcaa

SEQ ID NO: 1688 - RNA, 21 nt, synthetic construct
  source 1..21: mol_type = other RNA
ctcttcagcaccatgggccta

SEQ ID NO: 1689 - RNA, 21 nt, synthetic construct
  source 1..21: mol_type = other RNA
ggccttcttatacggaaggca

SEQ ID NO: 1690 - RNA, 21 nt, synthetic construct
  source 1..21: mol_type = other RNA
atacggaaggctctgggatca

SEQ ID NO: 1691 - RNA, 21 nt, synthetic construct
  source 1..21: mol_type = other RNA
cccccttgtggggcaggctca

SEQ ID NO: 1692 - RNA, 21 nt, synthetic construct
  source 1..21: mol_type = other RNA
ggtttagggtgatcagtgcta

SEQ ID NO: 1693 - RNA, 21 nt, synthetic construct
  source 1..21: mol_type = other RNA
ttgaaaaggcacgctggctta

SEQ ID NO: 1694 - RNA, 21 nt, synthetic construct
  source 1..21: mol_type = other RNA
ggcttgtgatcttaaatgaga

SEQ ID NO: 1695 - RNA, 21 nt, synthetic construct
  source 1..21: mol_type = other RNA
ttaaatgaggacaatccccca

SEQ ID NO: 1696 - RNA, 21 nt, synthetic construct
  source 1..21: mol_type = other RNA
cagggctgggcactcctccca

SEQ ID NO: 1697 - RNA, 21 nt, synthetic construct
  source 1..21: mol_type = other RNA
tcccacctgcagagccagtga

SEQ ID NO: 1698 - RNA, 21 nt, synthetic construct
  source 1..21: mol_type = other RNA
tgggtgggctagataggataa

SEQ ID NO: 1699 - RNA, 21 nt, synthetic construct
  source 1..21: mol_type = other RNA
ggatatactgtatgccggcta

SEQ ID NO: 1700 - RNA, 21 nt, synthetic construct
  source 1..21: mol_type = other RNA
cggctccttcaagctgctgaa

SEQ ID NO: 1701 - RNA, 21 nt, synthetic construct
  source 1..21: mol_type = other RNA
gctgactcactttatcaataa

SEQ ID NO: 1702 - RNA, 21 nt, synthetic construct
  source 1..21: mol_type = other RNA
aattgacttcagtggtgagaa

SEQ ID NO: 1703 - RNA, 21 nt, synthetic construct
  source 1..21: mol_type = other RNA
tgagactgtatcctgtttgca

SEQ ID NO: 1704 - RNA, 21 nt, synthetic construct
  source 1..21: mol_type = other RNA
tttgctattgcttgttgtgca

SEQ ID NO: 1705 - RNA, 21 nt, synthetic construct
  source 1..21: mol_type = other RNA
agttaacatgggcaaagggaa

SEQ ID NO: 1706 - RNA, 21 nt, synthetic construct
  source 1..21: mol_type = other RNA
agggagatcttggggtgcaga

SEQ ID NO: 1707 - RNA, 21 nt, synthetic construct
  source 1..21: mol_type = other RNA
tgcagcacttaaactgcctca

SEQ ID NO: 1708 - RNA, 21 nt, synthetic construct
  source 1..21: mol_type = other RNA
tcatgatttcaaccacattta

SEQ ID NO: 1709 - RNA, 21 nt, synthetic construct
  source 1..21: mol_type = other RNA
ggagcagccacggagttagaa

SEQ ID NO: 1710 - RNA, 21 nt, synthetic construct
  source 1..21: mol_type = other RNA
ggcccttggggtttctcttta

SEQ ID NO: 1711 - RNA, 21 nt, synthetic construct
  source 1..21: mol_type = other RNA
ctcttttccactgacaggcta

SEQ ID NO: 1712 - RNA, 21 nt, synthetic construct
  source 1..21: mol_type = other RNA
caggctttcccaggcagctga

SEQ ID NO: 1713 - RNA, 21 nt, synthetic construct
  source 1..21: mol_type = other RNA
agctggctagttcattcccta

SEQ ID NO: 1714 - RNA, 21 nt, synthetic construct
  source 1..21: mol_type = other RNA
cctccccagccaggtgcagga

SEQ ID NO: 1715 - RNA, 21 nt, synthetic construct
  source 1..21: mol_type = other RNA
caggcgtaggaatatggacaa

SEQ ID NO: 1716 - RNA, 21 nt, synthetic construct
  source 1..21: mol_type = other RNA
tggacatctggttgctttgga

SEQ ID NO: 1717 - RNA, 21 nt, synthetic construct
  source 1..21: mol_type = other RNA
tgctttggcctgctgccctca

SEQ ID NO: 1718 - RNA, 21 nt, synthetic construct
  source 1..21: mol_type = other RNA
ctgccctctttcaggggtcca

SEQ ID NO: 1719 - RNA, 21 nt, synthetic construct
  source 1..21: mol_type = other RNA
ggtcctaagcccacaatcata

SEQ ID NO: 1720 - RNA, 21 nt, synthetic construct
  source 1..21: mol_type = other RNA
atcatgcctccctaagaccta

SEQ ID NO: 1721 - RNA, 21 nt, synthetic construct
  source 1..21: mol_type = other RNA
gaccttggcatccttccctca

SEQ ID NO: 1722 - RNA, 21 nt, synthetic construct
  source 1..21: mol_type = other RNA
tccctctaagccgttggcaca

SEQ ID NO: 1723 - RNA, 21 nt, synthetic construct
  source 1..21: mol_type = other RNA
ttggcacctctgtgccaccta

SEQ ID NO: 1724 - RNA, 21 nt, synthetic construct
  source 1..21: mol_type = other RNA
gctccagacacacagcctgta

SEQ ID NO: 1725 - RNA, 21 nt, synthetic construct
  source 1..21: mol_type = other RNA
ctgagatcactcgcttcacca

SEQ ID NO: 1726 - RNA, 21 nt, synthetic construct
  source 1..21: mol_type = other RNA
tcaccctcctcatctttgtta

SEQ ID NO: 1727 - RNA, 21 nt, synthetic construct
  source 1..21: mol_type = other RNA
ttgttctccaagtaaagccaa

SEQ ID NO: 1728 - RNA, 21 nt, synthetic construct
  source 1..21: mol_type = other RNA
tcataaaacttctgatttcta

SEQ ID NO: 1729 - RNA, 21 nt, synthetic construct
  source 1..21: mol_type = other RNA
tttctcttcagctttgaaaaa

SEQ ID NO: 1730 - RNA, 21 nt, synthetic construct
  source 1..21: mol_type = other RNA
ttgaaaagggttaccctggga

SEQ ID NO: 1731 - RNA, 21 nt, synthetic construct
  source 1..21: mol_type = other RNA
ctgggcactggcctagagcca

SEQ ID NO: 1732 - RNA, 21 nt, synthetic construct
  source 1..21: mol_type = other RNA
gcctcacctcctaatagacta

SEQ ID NO: 1733 - RNA, 21 nt, synthetic construct
  source 1..21: mol_type = other RNA
agacttagccccatgagttta

SEQ ID NO: 1734 - RNA, 21 nt, synthetic construct
  source 1..21: mol_type = other RNA
gcaggactatttctggcacta

SEQ ID NO: 1735 - RNA, 21 nt, synthetic construct
  source 1..21: mol_type = other RNA
gcacttgcaagtcccatgata

SEQ ID NO: 1736 - RNA, 21 nt, synthetic construct
  source 1..21: mol_type = other RNA
atgatttcttcggtaattcta

SEQ ID NO: 1737 - RNA, 21 nt, synthetic construct
  source 1..21: mol_type = other RNA
tcggtaattctgagggtggga

SEQ ID NO: 1738 - RNA, 21 nt, synthetic construct
  source 1..21: mol_type = other RNA
gggacatgaaatcatcttaga

SEQ ID NO: 1739 - RNA, 21 nt, synthetic construct
  source 1..21: mol_type = other RNA
cttagcttagctttctgtcta

SEQ ID NO: 1740 - RNA, 21 nt, synthetic construct
  source 1..21: mol_type = other RNA
tgtctgtgaatgtctatataa

SEQ ID NO: 1741 - RNA, 21 nt, synthetic construct
  source 1..21: mol_type = other RNA
atatagtgtattgtgtgttta

SEQ ID NO: 1742 - RNA, 21 nt, synthetic construct
  source 1..21: mol_type = other RNA
tcgactatcaggtgaacttta

SEQ ID NO: 1743 - RNA, 21 nt, synthetic construct
  source 1..21: mol_type = other RNA
tcaggtgaactttgaaccaga

SEQ ID NO: 1744 - RNA, 21 nt, synthetic construct
  source 1..21: mol_type = other RNA
gagttcgaagtgatggaagaa

SEQ ID NO: 1745 - RNA, 21 nt, synthetic construct
  source 1..21: mol_type = other RNA
tggatttcctctccaaagtta

SEQ ID NO: 1746 - RNA, 21 nt, synthetic construct
  source 1..21: mol_type = other RNA
ttcacgtttcacgtggaaata

SEQ ID NO: 1747 - RNA, 21 nt, synthetic construct
  source 1..21: mol_type = other RNA
atggtcagtaaaagcaaagaa

SEQ ID NO: 1748 - RNA, 21 nt, synthetic construct
  source 1..21: mol_type = other RNA
gacaaaaaagccaagacatca

SEQ ID NO: 1749 - RNA, 21 nt, synthetic construct
  source 1..21: mol_type = other RNA
aaagccaagacatccacacga

SEQ ID NO: 1750 - RNA, 21 nt, synthetic construct
  source 1..21: mol_type = other RNA
accttgaaaaataggccttga

SEQ ID NO: 1751 - RNA, 21 nt, synthetic construct
  source 1..21: mol_type = other RNA
cttcctctcctaaatacgtca

SEQ ID NO: 1752 - RNA, 21 nt, synthetic construct
  source 1..21: mol_type = other RNA
aaatacgtctcttctgtcaca

SEQ ID NO: 1753 - RNA, 21 nt, synthetic construct
  source 1..21: mol_type = other RNA
gggaaggtgcagataattaaa

SEQ ID NO: 1754 - RNA, 21 nt, synthetic construct
  source 1..21: mol_type = other RNA
tgcagataattaataagaaga

SEQ ID NO: 1755 - RNA, 21 nt, synthetic construct
  source 1..21: mol_type = other RNA
attaataagaagctggatcta

SEQ ID NO: 1756 - RNA, 21 nt, synthetic construct
  source 1..21: mol_type = other RNA
gaagctggatcttagcaacga

SEQ ID NO: 1757 - RNA, 21 nt, synthetic construct
  source 1..21: mol_type = other RNA
gataatatcaaacacgtccca

SEQ ID NO: 1758 - RNA, 21 nt, synthetic construct
  source 1..21: mol_type = other RNA
tgcaaatagtctacaaaccaa

SEQ ID NO: 1759 - RNA, 21 nt, synthetic construct
  source 1..21: mol_type = other RNA
aaaatctgagaagcttgacta

SEQ ID NO: 1760 - RNA, 21 nt, synthetic construct
  source 1..21: mol_type = other RNA
gcttgacttcaaggacagaga

SEQ ID NO: 1761 - RNA, 21 nt, synthetic construct
  source 1..21: mol_type = other RNA
gcggaggaaataaaaagatta

SEQ ID NO: 1762 - RNA, 21 nt, synthetic construct
  source 1..21: mol_type = other RNA
aaagattgaaacccacaagca

SEQ ID NO: 1763 - RNA, 21 nt, synthetic construct
  source 1..21: mol_type = other RNA
caataattgtggagaggagaa

SEQ ID NO: 1764 - RNA, 21 nt, synthetic construct
  source 1..21: mol_type = other RNA
ttaattggttaatcacttaaa

SEQ ID NO: 1765 - RNA, 21 nt, synthetic construct
  source 1..21: mol_type = other RNA
ttcaaaatcagtgatgggaga

SEQ ID NO: 1766 - RNA, 21 nt, synthetic construct
  source 1..21: mol_type = other RNA
ggagtaagagcaaatttcata

SEQ ID NO: 1767 - RNA, 21 nt, synthetic construct
  source 1..21: mol_type = other RNA
ttcatctttccaaattgatga

SEQ ID NO: 1768 - RNA, 21 nt, synthetic construct
  source 1..21: mol_type = other RNA
attgatgggtgggctagtaaa

SEQ ID NO: 1769 - RNA, 21 nt, synthetic construct
  source 1..21: mol_type = other RNA
aacattcaaaaacatggccaa

SEQ ID NO: 1770 - RNA, 21 nt, synthetic construct
  source 1..21: mol_type = other RNA
aaaaacatggccacatccaaa

SEQ ID NO: 1771 - RNA, 21 nt, synthetic construct
  source 1..21: mol_type = other RNA
ccaacatttcctcaggcaata

SEQ ID NO: 1772 - RNA, 21 nt, synthetic construct
  source 1..21: mol_type = other RNA
tttcctcaggcaattccttta

SEQ ID NO: 1773 - RNA, 21 nt, synthetic construct
  source 1..21: mol_type = other RNA
ggcaattccttttgattctta

SEQ ID NO: 1774 - RNA, 21 nt, synthetic construct
  source 1..21: mol_type = other RNA
cttttgattcttttttcttca

SEQ ID NO: 1775 - RNA, 21 nt, synthetic construct
  source 1..21: mol_type = other RNA
aacaaaggatttgaaacttga

SEQ ID NO: 1776 - RNA, 21 nt, synthetic construct
  source 1..21: mol_type = other RNA
gatttgaaacttggtgtgtta

SEQ ID NO: 1777 - RNA, 21 nt, synthetic construct
  source 1..21: mol_type = other RNA
atgacctccttagaaaagaca

SEQ ID NO: 1778 - RNA, 21 nt, synthetic construct
  source 1..21: mol_type = other RNA
tccttagaaaagactgaccta

SEQ ID NO: 1779 - RNA, 21 nt, synthetic construct
  source 1..21: mol_type = other RNA
ccacagaaaccctgttttata

SEQ ID NO: 1780 - RNA, 21 nt, synthetic construct
  source 1..21: mol_type = other RNA
aaccctgttttattgagttca

SEQ ID NO: 1781 - RNA, 21 nt, synthetic construct
  source 1..21: mol_type = other RNA
ttttattgagttctgaaggta

SEQ ID NO: 1782 - RNA, 21 nt, synthetic construct
  source 1..21: mol_type = other RNA
gagttctgaaggttggaacta

SEQ ID NO: 1783 - RNA, 21 nt, synthetic construct
  source 1..21: mol_type = other RNA
gggctaaccagttctctttga

SEQ ID NO: 1784 - RNA, 21 nt, synthetic construct
  source 1..21: mol_type = other RNA
cagttctctttgtaaggacta

SEQ ID NO: 1785 - RNA, 21 nt, synthetic construct
  source 1..21: mol_type = other RNA
ttgtaaggacttgtgcctcta

SEQ ID NO: 1786 - RNA, 21 nt, synthetic construct
  source 1..21: mol_type = other RNA
ccacgaatctcatgatctgaa

SEQ ID NO: 1787 - RNA, 21 nt, synthetic construct
  source 1..21: mol_type = other RNA
ctcatgatctgattcggttca

SEQ ID NO: 1788 - RNA, 21 nt, synthetic construct
  source 1..21: mol_type = other RNA
ccccttggaaatggttcttta

SEQ ID NO: 1789 - RNA, 21 nt, synthetic construct
  source 1..21: mol_type = other RNA
agcagctgaacatatacataa

SEQ ID NO: 1790 - RNA, 21 nt, synthetic construct
  source 1..21: mol_type = other RNA
tgaacatatacatagatgtta

SEQ ID NO: 1791 - RNA, 21 nt, synthetic construct
  source 1..21: mol_type = other RNA
cctgttgagttgtagttggaa

SEQ ID NO: 1792 - RNA, 21 nt, synthetic construct
  source 1..21: mol_type = other RNA
gttgtagttggatttgtctga

SEQ ID NO: 1793 - RNA, 21 nt, synthetic construct
  source 1..21: mol_type = other RNA
ttggatttgtctgtttatgca

SEQ ID NO: 1794 - RNA, 21 nt, synthetic construct
  source 1..21: mol_type = other RNA
tgtctgtttatgcttggatta

SEQ ID NO: 1795 - RNA, 21 nt, synthetic construct
  source 1..21: mol_type = other RNA
tatgcttggattcaccagaga

SEQ ID NO: 1796 - RNA, 21 nt, synthetic construct
  source 1..21: mol_type = other RNA
ggattcaccagagtgactata

SEQ ID NO: 1797 - RNA, 21 nt, synthetic construct
  source 1..21: mol_type = other RNA
cgcatgtatcttgaaatgcta

SEQ ID NO: 1798 - RNA, 21 nt, synthetic construct
  source 1..21: mol_type = other RNA
tcttgaaatgcttgtaaagaa

SEQ ID NO: 1799 - RNA, 21 nt, synthetic construct
  source 1..21: mol_type = other RNA
aagaggtttctaacccaccca

SEQ ID NO: 1800 - RNA, 21 nt, synthetic construct
  source 1..21: mol_type = other RNA
aagttttgaaaggctttccta

SEQ ID NO: 1801 - RNA, 21 nt, synthetic construct
  source 1..21: mol_type = other RNA
aggaaggatgacttgacaaga

SEQ ID NO: 1802 - RNA, 21 nt, synthetic construct
  source 1..21: mol_type = other RNA
cattgctgcctaaagaaacta

SEQ ID NO: 1803 - RNA, 21 nt, synthetic construct
  source 1..21: mol_type = other RNA
ctggtttgggtacagttaaaa

SEQ ID NO: 1804 - RNA, 21 nt, synthetic construct
  source 1..21: mol_type = other RNA
ttctcctaagttgaagggata

SEQ ID NO: 1805 - RNA, 21 nt, synthetic construct
  source 1..21: mol_type = other RNA
aagttgaagggatctgagaaa

SEQ ID NO: 1806 - RNA, 21 nt, synthetic construct
  source 1..21: mol_type = other RNA
tgagaaggagaaggaaatgta

SEQ ID NO: 1807 - RNA, 21 nt, synthetic construct
  source 1..21: mol_type = other RNA
atcatggtttagggtgatcaa

SEQ ID NO: 1808 - RNA, 21 nt, synthetic construct
  source 1..21: mol_type = other RNA
gatcagtgctggcagataaaa

SEQ ID NO: 1809 - RNA, 21 nt, synthetic construct
  source 1..21: mol_type = other RNA
tggcagataaattgaaaagga

SEQ ID NO: 1810 - RNA, 21 nt, synthetic construct
  source 1..21: mol_type = other RNA
taaattgaaaaggcacgctga

SEQ ID NO: 1811 - RNA, 21 nt, synthetic construct
  source 1..21: mol_type = other RNA
attgaaaaggcacgctggcta

SEQ ID NO: 1812 - RNA, 21 nt, synthetic construct
  source 1..21: mol_type = other RNA
gataggatatactgtatgcca

SEQ ID NO: 1813 - RNA, 21 nt, synthetic construct
  source 1..21: mol_type = other RNA
actcactttatcaatagttca

SEQ ID NO: 1814 - RNA, 21 nt, synthetic construct
  source 1..21: mol_type = other RNA
tatcaatagttccatttaaaa

SEQ ID NO: 1815 - RNA, 21 nt, synthetic construct
  source 1..21: mol_type = other RNA
agttccatttaaattgactta

SEQ ID NO: 1816 - RNA, 21 nt, synthetic construct
  source 1..21: mol_type = other RNA
tttaaattgacttcagtggta

SEQ ID NO: 1817 - RNA, 21 nt, synthetic construct
  source 1..21: mol_type = other RNA
actgtatcctgtttgctatta

SEQ ID NO: 1818 - RNA, 21 nt, synthetic construct
  source 1..21: mol_type = other RNA
cctgtttgctattgcttgtta

SEQ ID NO: 1819 - RNA, 21 nt, synthetic construct
  source 1..21: mol_type = other RNA
gctattgcttgttgtgctata

SEQ ID NO: 1820 - RNA, 21 nt, synthetic construct
  source 1..21: mol_type = other RNA
atgtgtaagatagttaacata

SEQ ID NO: 1821 - RNA, 21 nt, synthetic construct
  source 1..21: mol_type = other RNA
gatagttaacatgggcaaaga

SEQ ID NO: 1822 - RNA, 21 nt, synthetic construct
  source 1..21: mol_type = other RNA
ttaacatgggcaaagggagaa

SEQ ID NO: 1823 - RNA, 21 nt, synthetic construct
  source 1..21: mol_type = other RNA
cgtaacccttttcatgattta

SEQ ID NO: 1824 - RNA, 21 nt, synthetic construct
  source 1..21: mol_type = other RNA
gatttcaaccacatttgctaa

SEQ ID NO: 1825 - RNA, 21 nt, synthetic construct
  source 1..21: mol_type = other RNA
taggaatatggacatctggta

SEQ ID NO: 1826 - RNA, 21 nt, synthetic construct
  source 1..21: mol_type = other RNA
tatggacatctggttgcttta

SEQ ID NO: 1827 - RNA, 21 nt, synthetic construct
  source 1..21: mol_type = other RNA
atctttgttctccaagtaaaa

SEQ ID NO: 1828 - RNA, 21 nt, synthetic construct
  source 1..21: mol_type = other RNA
agacctgcagcttcataaaaa

SEQ ID NO: 1829 - RNA, 21 nt, synthetic construct
  source 1..21: mol_type = other RNA
gcttcataaaacttctgatta

SEQ ID NO: 1830 - RNA, 21 nt, synthetic construct
  source 1..21: mol_type = other RNA
tcttcagctttgaaaagggta

SEQ ID NO: 1831 - RNA, 21 nt, synthetic construct
  source 1..21: mol_type = other RNA
gccatgttgagcaggactata

SEQ ID NO: 1832 - RNA, 21 nt, synthetic construct
  source 1..21: mol_type = other RNA
tttcttcggtaattctgagga

SEQ ID NO: 1833 - RNA, 21 nt, synthetic construct
  source 1..21: mol_type = other RNA
catgaaatcatcttagcttaa

SEQ ID NO: 1834 - RNA, 21 nt, synthetic construct
  source 1..21: mol_type = other RNA
catcttagcttagctttctga

SEQ ID NO: 1835 - RNA, 21 nt, synthetic construct
  source 1..21: mol_type = other RNA
tttctgtctgtgaatgtctaa

SEQ ID NO: 1836 - RNA, 21 nt, synthetic construct
  source 1..21: mol_type = other RNA
gtctatatagtgtattgtgta

SEQ ID NO: 1837 - RNA, 21 nt, synthetic construct
  source 1..21: mol_type = other RNA
gtgtgttttaacaaatgatta

SEQ ID NO: 1838 - RNA, 21 nt, synthetic construct
  source 1..21: mol_type = other RNA
atgatttacactgactgttga

SEQ ID NO: 1839 - RNA, 21 nt, synthetic construct
  source 1..21: mol_type = other RNA
cactgactgttgctgtaaaaa

SEQ ID NO: 1840 - RNA, 21 nt, synthetic construct
  source 1..21: mol_type = other RNA
gttgctgtaaaagtgaattta

SEQ ID NO: 1841 - RNA, 21 nt, synthetic construct
  source 1..21: mol_type = other RNA
atttggaaataaagttattaa

SEQ ID NO: 1842 - RNA, 21 nt, synthetic construct
  source 1..21: mol_type = other RNA
aataaagttattactctgata

1.-7. (canceled)

8. An oligomeric compound, wherein the oligomeric compound comprises a modified oligonucleotide consisting of 12 to 50 linked nucleosides, wherein the nucleobase sequence of the modified oligonucleotide is complementary to at least 12, at least 13, at least 14, at least 15, at least 16, at least 17, at least 18, at least 19, at least 20, at least 21, at least 22, or 23 contiguous nucleobases of:
an equal length portion of nucleobases of 110-142 of SEQ ID NO: 1;
an equal length portion of nucleobases of 1754-1783 SEQ ID NO: 1;
an equal length portion of nucleobases of 2332-2362 SEQ ID NO: 1; or
an equal length portion of nucleobases of 6523-6552 SEQ ID NO: 1.

9. The oligomeric compound of claim 8, wherein the nucleobase sequence of the modified oligonucleotide is complementary to at least 12, at least 13, at least 14, at least 15, at least 16, at least 17, at least 18, at least 19, at least 20, at least 21, at least 22, or 23 contiguous nucleobases of:
SEQ ID NOs: 721, 850, 1115, or 1116;
SEQ ID NOs: 885, 1142, or 1360;
SEQ ID NOs: 329, 1045, or 1343; and
SEQ ID NOs: 890, 1330, or 1431.

10. (canceled)

11. The oligomeric compound of claim 8, wherein at least one nucleoside of the modified oligonucleotide comprises a modified sugar moiety.

12. The oligomeric compound of claim 11, wherein the modified sugar moiety comprises a bicyclic sugar moiety.

13. The oligomeric compound of claim 12, wherein the bicyclic sugar moiety comprises a 2′-4′ bridge, wherein the 2′-4′ bridge is selected from —O—CH2- and —O—CH(CH3)-.

14. (canceled)

15. The oligomeric compound of claim 11, wherein the modified sugar moiety comprises a non-bicyclic modified sugar moiety, and wherein the non-bicyclic modified sugar moiety is a 2′-MOE sugar moiety, a 2′-OMe sugar moiety, or a 2′-F sugar moiety.

16. (canceled)

17. (canceled)

18. The oligomeric compound of claim 8, wherein the modified oligonucleotide comprises at least one modified internucleoside linkage.

19.-29. (canceled)

30. The oligomeric compound of claim 8, wherein the oligomeric compound comprises a conjugate group.

31.-36. (canceled)

37. An oligomeric duplex, comprising a first oligomeric compound comprising a first modified oligonucleotide and a second oligomeric compound comprising a second modified oligonucleotide, wherein the first oligomeric compound is an oligomeric compound of claim 8.

38. The oligomeric duplex of claim 37, wherein the second modified oligonucleotide consists of 8 to 80 linked nucleosides, and wherein the nucleobase sequence of the second modified oligonucleotide comprises a complementary region of at least 8 nucleobases that is at least 90% complementary to an equal length portion of the first modified oligonucleotide.

39. (canceled)

40. (canceled)

41. (canceled)

42. The oligomeric duplex of claim 37, wherein the first modified oligonucleotide comprises a 5′-stabilized phosphate group selected from a cyclopropyl phosphonate or a vinyl phosphonate.

43. (canceled)

44. (canceled)

45. (canceled)

46. The oligomeric duplex of claim 37, wherein at least one nucleoside of the second modified oligonucleotide comprises a modified sugar moiety.

47. The oligomeric duplex of claim 46, wherein the modified sugar moiety of the second modified oligonucleotide comprises a bicyclic sugar moiety.

48. The oligomeric duplex of claim 47, wherein the bicyclic sugar moiety of the second modified oligonucleotide comprises a 2′-4′ bridge selected from —O—CH2- and —O—CH(CH3)-.

49. (canceled)

50. The oligomeric duplex of claim 46, wherein the modified sugar moiety comprises a non-bicyclic modified sugar moiety, and wherein the non-bicyclic modified sugar moiety of the second modified oligonucleotide is a 2′-MOE sugar moiety, a 2′-F sugar moiety, or 2′-OMe sugar moiety.

51. (canceled)

52. (canceled)

53. (canceled)

54. (canceled)

55. (canceled)

56. (canceled)

57. (canceled)

58. (canceled)

59. The oligomeric duplex of claim 37, wherein the second modified oligonucleotide comprises a conjugate group, wherein the conjugate group is attached to the second modified oligonucleotide at the 5′-end or the 3′ end of the second modified oligonucleotide.

60. (canceled)

61. (canceled)

62. (canceled)

63. (canceled)

64. The oligomeric duplex of claim 37, wherein the second modified oligonucleotide comprises a terminal group, wherein the terminal group is an abasic sugar moiety.

65.-71. (canceled)

72. A chirally enriched population of oligomeric duplexes of claim 37, wherein the population is enriched for modified oligonucleotides comprising at least one particular phosphorothioate internucleoside linkage having a particular stereochemical configuration.

73. (canceled)

74. (canceled)

75. (canceled)

76. A pharmaceutical composition comprising the oligomeric compound of claim 8, and a pharmaceutically acceptable diluent or carrier.

77. (canceled)

78. (canceled)

79. A method comprising administering to an animal the oligomeric compound of claim 8.

80. (canceled)

81. (canceled)

82. A method of treating a tau-associated disease comprising administering to an individual having or at risk for developing the tau-associated disease a therapeutically effective amount of the oligomeric compound of claim 8, thereby treating the tau-associated disease.

83. The method of claim 82, wherein the tau-associated disease is a tauopathy, Alzheimer's disease, frontotemporal dementia (FTD), frontotemporal dementia with parkinsonism-17 (FTDP-17), progressive supranuclear palsy (PSP), chronic traumatic encephalopathy (CTE), corticobasal ganglionic degeneration (CBD), epilepsy, or Dravet's Syndrome.

84.-94. (canceled)

95. A method of reducing tau in a cell comprising contacting the cell with the oligomeric compound of claim 8.

96.-103. (canceled)
